(19) United States
(12) Patent Application Publication
(10) Pub. No.: US 2012/0102599 A1
(43) Pub. Date: Apr. 26, 2012

(54) Plants Having Enhanced Yield-Related Traits and a Method for Making the Same

(75) Inventors: Ju Kon Kim, Sungnam (KR); Yang Do Choi, Gwanak-Gu (KR); Jin Seo Jeong, Yongin (KR); Christophe Reuzeau, Tocan Saint Apre (FR)

(73) Assignees: Crop Functional Genomics Center, Seoul (KR); BASF Plant Science Company GmbH, Ludwigshafen (DE)

(21) Appl. No.: 13/266,968

(22) PCT Filed: Apr. 19, 2010
(86) PCT No.: PCT/EP2010/055099

§ 371 Date: Dec. 19, 2011

Related U.S. Application Data
(60) Provisional application No. 61/180,948, filed on May 26, 2009.
(60) Provisional application No. 61/223,712, filed on Jul. 8, 2009.

(30) Foreign Application Priority Data
Apr. 29, 2009 (EP) 09159059.6
Jul. 7, 2009 (EP) 09164832.9

(51) Int. Cl. A01H 5/00; C12N 5/04; C12N 15/82; A01H 1/00; A01H 5/10

(52) U.S. Cl. 800/290; 800/278; 800/298; 435/320.1; 435/419; 800/320.2; 800/320.1; 800/320.3; 800/320; 435/412

(57) ABSTRACT

The present invention relates generally to the field of molecular biology and concerns a method for enhancing various economically important yield-related traits in plants. More specifically, the present invention concerns a method for enhancing yield-related traits in plants by modulating expression in a plant of a nucleic acid encoding an IAA2-like (auxin/indoleacetic acid 2 like) polypeptide. The present invention also concerns plants having modulated expression of a nucleic acid encoding IAA2-like polypeptide, which plants have enhanced yield-related traits relative to control plants. The invention also provides constructs comprising IAA2-like-encoding nucleic acids, useful in performing the methods of the invention. The present invention also relates generally to the field of molecular biology and concerns a method for improving various plant growth characteristics by modulating expression in a plant of a nucleic acid encoding a NAC10-like polypeptide. The present invention also concerns plants having modulated expression of a nucleic acid encoding a NAC10-like polypeptide, which plants have improved growth characteristics relative to corresponding wild type plants or other control plants. The invention also provides constructs useful in the methods of the invention.

[0001] The present invention relates generally to the field of molecular biology and concerns a method for enhancing various economically important yield-related traits in plants. More specifically, the present invention concerns a method for enhancing yield-related traits in plants by modulating expression in a plant of a nucleic acid encoding an IAA2-like (auxin/indoleacetic acid 2 like) polypeptide. The present invention also concerns plants having modulated expression of a nucleic acid encoding IAA2-like polypeptide, which plants have enhanced yield-related traits relative to control plants. The invention also provides constructs comprising IAA2-like-encoding nucleic acids, useful in performing the methods of the invention.

[0002] The present invention also relates generally to the field of molecular biology and concerns a method for improving various plant growth characteristics by modulating expression in a plant of a nucleic acid encoding a NAC10-like polypeptide. The present invention also concerns plants having modulated expression of a nucleic acid encoding a NAC10-like polypeptide, which plants have improved growth characteristics relative to corresponding wild type plants or other control plants. The invention also provides constructs useful in the methods of the invention.

[0003] The ever-increasing world population and the dwindling supply of arable land available for agriculture fuels research towards increasing the efficiency of agriculture. Conventional means for crop and horticultural improvements utilise selective breeding techniques to identify plants having desirable characteristics. However, such selective breeding techniques have several drawbacks, namely that these techniques are typically labour intensive and result in plants that often contain heterogeneous genetic components that may not always result in the desirable trait being passed on from parent plants. Advances in molecular biology have allowed mankind to modify the germplasm of animals and plants. Genetic engineering of plants entails the isolation and manipulation of genetic material (typically in the form of DNA or RNA) and the subsequent introduction of that genetic material into a plant. Such technology has the capacity to deliver crops or plants having various improved economic, agronomic or horticultural traits.

[0004] A trait of particular economic interest is increased yield. Yield is normally defined as the measurable produce of economic value from a crop. This may be defined in terms of quantity and/or quality. Yield is directly dependent on several factors, for example, the number and size of the organs, plant architecture (for example, the number of branches), seed production, leaf senescence and more. Root development, nutrient uptake, stress tolerance and early vigour may also be important factors in determining yield. Optimizing the abovementioned factors may therefore contribute to increasing crop yield.

[0005] Seed yield is a particularly important trait, since the seeds of many plants are important for human and animal nutrition. Crops such as corn, rice, wheat, canola and soybean account for over half the total human caloric intake, whether through direct consumption of the seeds themselves or through consumption of meat products raised on processed seeds. They are also a source of sugars, oils and many kinds of metabolites used in industrial processes. Seeds contain an embryo (the source of new shoots and roots) and an endosperm (the source of nutrients for embryo growth during germination and during early growth of seedlings). The development of a seed involves many genes, and requires the transfer of metabolites from the roots, leaves and stems into the growing seed. The endosperm, in particular, assimilates the metabolic precursors of carbohydrates, oils and proteins and synthesizes them into storage macromolecules to fill out the grain.

[0006] Plant biomass is yield for forage crops like alfalfa, silage corn and hay. Many proxies for yield have been used in grain crops. Chief amongst these are estimates of plant size. Plant size can be measured in many ways depending on species and developmental stage, but include total plant dry weight, above-ground dry weight, above-ground fresh weight, leaf area, stem volume, plant height, rosette diameter, leaf length, root length, root mass, tiller number and leaf number. Many species maintain a conservative ratio between the size of different parts of the plant at a given developmental stage. These allometric relationships are used to extrapolate from one of these measures of size to another (e.g. Tittonell et al 2005 Agric Ecosys & Environ 105: 213). Plant size at an early developmental stage will typically correlate with plant size later in development. A larger plant with a greater leaf area can typically absorb more light and carbon dioxide than a smaller plant and therefore will likely gain a greater weight during the same period (Fasoula & Tollenaar 2005 Maydica 50:39). This is in addition to the potential continuation of the micro-environmental or genetic advantage that the plant had to achieve the larger size initially. There is a strong genetic component to plant size and growth rate (e.g. ter Steege et al 2005 Plant Physiology 139:1078), and so for a range of diverse genotypes plant size under one environmental condition is likely to correlate with size under another (Hittalmani et al 2003 Theoretical Applied Genetics 107:679). In this way a standard environment is used as a proxy for the diverse and dynamic environments encountered at different locations and times by crops in the field.

[0007] Another important trait for many crops is early vigour. Improving early vigour is an important objective of modern rice breeding programs in both temperate and tropical rice cultivars. Long roots are important for proper soil anchorage in water-seeded rice. Where rice is sown directly into flooded fields, and where plants must emerge rapidly through water, longer shoots are associated with vigour. Where drill-seeding is practiced, longer mesocotyls and coleoptiles are important for good seedling emergence. The ability to engineer early vigour into plants would be of great importance in agriculture. For example, poor early vigour has been a limitation to the introduction of maize (Zea mays L.) hybrids based on Corn Belt germplasm in the European Atlantic.

[0008] Harvest index, the ratio of seed yield to aboveground dry weight, is relatively stable under many environmental conditions and so a robust correlation between plant size and grain yield can often be obtained (e.g. Rebetzke et al 2002 Crop Science 42:739). These processes are intrinsically linked because the majority of grain biomass is dependent on current or stored photosynthetic productivity by the leaves and stem of the plant (Gardener et al 1985 Physiology of Crop Plants. Iowa State University Press, pp 68-73). Therefore, selecting for plant size, even at early stages of development, has been used as an indicator for future potential yield (e.g. Tittonell et al 2005 Agric Ecosys & Environ 105: 213). When testing for the impact of genetic differences on stress tolerance, the ability to standardize soil properties, temperature, water and nutrient availability and light intensity is an intrinsic advantage of greenhouse or plant growth chamber environments compared to the field. However, artificial limitations on yield due to poor pollination due to the absence of wind or insects, or insufficient space for mature root or canopy growth, can restrict the use of these controlled environments for testing yield differences. Therefore, measurements of plant size in early development, under standardized conditions in a growth chamber or greenhouse, are standard practices to provide indication of potential genetic yield advantages.

[0009] A further important trait is that of improved abiotic stress tolerance. Abiotic stress is a primary cause of crop loss worldwide, reducing average yields for most major crop plants by more than 50% (Wang et al., Planta 218, 1-14, 2003). Abiotic stresses may be caused by drought, salinity, extremes of temperature, chemical toxicity and oxidative stress. The ability to improve plant tolerance to abiotic stress would be of great economic advantage to farmers worldwide and would allow for the cultivation of crops during adverse conditions and in territories where cultivation of crops may not otherwise be possible.

[0010] Crop yield may therefore be increased by optimising one of the above-mentioned factors.

[0011] Depending on the end use, the modification of certain yield traits may be favoured over others. For example for applications such as forage or wood production, or bio-fuel resource, an increase in the vegetative parts of a plant may be desirable, and for applications such as flour, starch or oil production, an increase in seed parameters may be particularly desirable. Even amongst the seed parameters, some may be favoured over others, depending on the application. Various mechanisms may contribute to increasing seed yield, whether that is in the form of increased seed size or increased seed number.

[0012] One approach to increasing yield (seed yield and/or biomass) in plants may be through modification of the inherent growth mechanisms of a plant, such as the cell cycle or various signalling pathways involved in plant growth or in defense mechanisms.

[0013] It has now been found that various yield-related traits may be improved in plants by modulating expression in a plant of a nucleic acid encoding an IAA2-like polypeptide in a plant.

[0014] It has now also been found that various growth characteristics may be improved in plants by modulating expression in a plant of a nucleic acid encoding a NAC10-like polypeptide in a plant.

### BACKGROUND

### 1. IAA2-Like Polypeptides

[0015] The AUX/IAA (auxin/indoleacetic acid) genes encode a family of proteins whose expression is tightly regulated by auxin. The plant hormone auxin is involved in various processes like cell division, cell expansion and differentiation, patterning of embryos, vasculature or other tissues, regulation of growth of primary and lateral root or shoot meristems. AUX/IAA proteins furthermore are usually expressed in a tissue-specific manner.

[0016] AUX/IAA proteins typically have four conserved amino acid sequence motifs (domains I, II, III and IV) and have nuclear localisation signal sequences. Domains I and II are postulated to destabilize the protein and may be involved in protein turnover. Domains III and IV are postulated to be involved in protein-protein interactions: AUX/IAA proteins can form homodimers and are known to associate with ARF proteins. The AUX/IAA-ARF complexes are likely to be involved in auxin mediated gene expression. The Aux/IAA proteins are negative regulators of the auxin response factors (ARFs) that regulate expression of auxin-responsive genes. Aux/IAA proteins bind to the DNA-bound ARF partner proteins and repress ARF activity. In the auxin activated status, Aux/IAA proteins are ubiquitinated via interactions with the auxin-modified SCFTIR1 complex and subsequently degraded by 26S proteasome action. An overview of roles and activities of AUX/IAA proteins is given by Reed (Trends in Plant Science 6, 420-425, 2001). The structure and expression analysis of early auxin-responsive Aux/IAA gene family in rice (Oryza sativa) has recently been reported by Jain et al. 2006 Funct Integr Genomics. 2006 January; 6(1):47-59.

### 2. NAC10-Like Polypeptides

[0017] The rice and Arabidopsis genome codes for over 1300 transcriptional regulators, which account for 6% of its estimated total number of genes. About 45% of these transcription factors are reported to be from families specific to plants (Riechmann et al., 2000; Kikuch et al., 2003). One example of such a plant-specific family of transcription factors is the family of NACs. NAC is an acronym derived from the names of the three genes first described as containing a NAC domain, namely NAM (no apical meristem), ATAF1,2 and CUC2 (cup-shaped cotyledon). NAC proteins contain a highly conserved N-terminal DNA-binding domain, which is referred to as the “NAC-domain”, and a variable C-terminal domain (Ooka et al., 2003). NAC proteins appear to be widespread in plants with the genomes of rice and Arabidopsis predicted to contain 75 and 105 NAC genes, respectively (Ooka et al., 2003; Xiong et al., 2005). Only a few of them have been characterized so far for their diverse functions in plant development and stress responses. The early reported NAC genes include NAM from petunia that determines the position of the shoot apical meristem (Souer et al., 1996) and CUC2 from Arabidopsis that participates in the development of embryos and flowers (Aida et al., 1997). The Arabidopsis NAP gene regulates cell division and cell expansion in flower organs (Sablowski et al., 1998). The AtNAC1 mediates auxin signaling to promote lateral root development (Xie et al., 2000). Genes in the ATAF subfamily, including StNAC (Collinge et al., 2001) from Potato (Solanum tuberosum) and ATAF1-2 (Aida et al., 1997) from Arabidopsis, were induced by pathogen attack and wounding. More recently, AtNAC072(RD29), AtNAC019, AtNAC055, and ANAC102 from Arabidopsis (Fujita et al., 2004; Tran et al., 2004; Christianson et al., 2009), BnNAC from Brassica napus (Hegedus et al., 2003), SNAC1 and SNAC2 from rice (Oryza sativa) (Hu et al., 2006; 2008), were found to be involved in response to various environmental stresses. AtNAC2, another stress-related NAC gene of Arabidopsis, acts downstream of the ethylene and auxin signal pathways and enhanced salt tolerance when overexpressed (He et al., 2005). A wheat NAC gene, NAM-B1, was reported to be involved in nutrient remobilization from leaves to developing grains (Uauy et al., 2006). Drought is a serious threat to the sustainability of rice yields in rainfed agriculture. In particular, exposure to drought conditions during the stage of panicle development results in a delayed flowering time, reduced number of spikelets and poor grain filling. To date, a number of studies have suggested that overexpression of stress related genes could improve drought tolerance in rice to some extent (Xu et al., 1996; Garg et al., 2002; Jang et al., 2003; Ito et al., 2006; Hu et al., 2006, 2008; Nakashima et al., 2007; Oh et al., 2007). Despite such efforts to develop drought-tolerant rice plants, very few of these have been shown to improve grain yields under field conditions.

### SUMMARY

### 1. IAA2-Like Polypeptides

[0018] Surprisingly, it has now been found that modulating expression of a nucleic acid encoding an IAA2-like polypeptide gives plants having enhanced yield-related traits relative to control plants.

[0019] According one embodiment, there is provided a method for enhancing yield-related traits of a plant relative to control plants, comprising modulating expression of a nucleic acid encoding an IAA2-like polypeptide in a plant.

### 2. NAC10-Like Polypeptides

[0020] Surprisingly, it has now been found that modulating expression of a nucleic acid encoding a NAC10-like polypeptide under control of a constitutive promoter or under control of a root-specific promoter gives plants having enhanced yield-related traits when grown under non-stress (normal) conditions and/or when grown under abiotic stress conditions, in particular improved tolerance to drought, high salinity and low temperature at vegetative stage and/or enhanced drought-tolerance at the reproductive stage, relative to control plants.

[0021] According one embodiment, there is provided a method for improving yield-related traits of a plant relative to control plants, comprising modulating expression of a nucleic acid encoding a NAC10-like polypeptide in a plant.

### DEFINITIONS

### Polypeptide(s)/Protein(s)

[0022] The terms “polypeptide” and “protein” are used interchangeably herein and refer to amino acids in a polymeric form of any length, linked together by peptide bonds.

### Polynucleotide(s)/Nucleic Acid(s)/Nucleic Acid Sequence(s)/Nucleotide Sequence(s)

[0023] The terms “polynucleotide(s)”, “nucleic acid sequence(s)”, “nucleotide sequence(s)”, “nucleic acid(s)”, “nucleic acid molecule” are used interchangeably herein and refer to nucleotides, either ribonucleotides or deoxyribonucleotides or a combination of both, in a polymeric unbranched form of any length.

### Homologue(s)

[0024] “Homologues” of a protein encompass peptides, oligopeptides, polypeptides, proteins and enzymes having amino acid substitutions, deletions and/or insertions relative to the unmodified protein in question and having similar biological and functional activity as the unmodified protein from which they are derived.

[0025] A deletion refers to removal of one or more amino acids from a protein.

[0026] An insertion refers to one or more amino acid residues being introduced into a predetermined site in a protein. Insertions may comprise N-terminal and/or C-terminal fusions as well as intra-sequence insertions of single or multiple amino acids. Generally, insertions within the amino acid sequence will be smaller than N- or C-terminal fusions, of the order of about 1 to 10 residues. Examples of N- or C-terminal fusion proteins or peptides include the binding domain or activation domain of a transcriptional activator as used in the yeast two-hybrid system, phage coat proteins, (histidine)-6-tag, glutathione S-transferase-tag, protein A, maltose-binding protein, dihydrofolate reductase, Tag•100 epitope, c-myc epitope, FLAG®-epitope, lacZ, CMP (calmodulin-binding peptide), HA epitope, protein C epitope and VSV epitope.

[0027] A substitution refers to replacement of amino acids of the protein with other amino acids having similar properties (such as similar hydrophobicity, hydrophilicity, antigenicity, propensity to form or break α-helical structures or β-sheet structures). Amino acid substitutions are typically of single residues, but may be clustered depending upon functional constraints placed upon the polypeptide and may range from 1 to 10 amino acids; insertions will usually be of the order of about 1 to 10 amino acid residues. The amino acid substitutions are preferably conservative amino acid substitutions. Conservative substitution tables are well known in the art (see for example Creighton (1984) Proteins. W.H. Freeman and Company (Eds) and Table 1 below).

TABLE 1
Examples of conserved amino acid substitutions

| Residue | Conservative Substitutions |
|---|---|
| Ala | Ser |
| Arg | Lys |
| Asn | Gln; His |
| Asp | Glu |
| Gln | Asn |
| Cys | Ser |
| Glu | Asp |
| Gly | Pro |
| His | Asn; Gln |
| Ile | Leu, Val |
| Leu | Ile; Val |
| Lys | Arg; Gln |
| Met | Leu; Ile |
| Phe | Met; Leu; Tyr |
| Ser | Thr; Gly |
| Thr | Ser; Val |
| Trp | Tyr |
| Tyr | Trp; Phe |
| Val | Ile; Leu |

[0028] Amino acid substitutions, deletions and/or insertions may readily be made using peptide synthetic techniques well known in the art, such as solid phase peptide synthesis and the like, or by recombinant DNA manipulation. Methods for the manipulation of DNA sequences to produce substitution, insertion or deletion variants of a protein are well known in the art. For example, techniques for making substitution mutations at predetermined sites in DNA are well known to those skilled in the art and include M13 mutagenesis, T7-Gen in vitro mutagenesis (USB, Cleveland, Ohio), QuickChange Site Directed mutagenesis (Stratagene, San Diego, Calif.), PCR-mediated site-directed mutagenesis or other site-directed mutagenesis protocols.

### Derivatives

[0029] “Derivatives” include peptides, oligopeptides, polypeptides which may, compared to the amino acid sequence of the naturally-occurring form of the protein, such as the protein of interest, comprise substitutions of amino acids with non-naturally occurring amino acid residues, or additions of non-naturally occurring amino acid residues. “Derivatives” of a protein also encompass peptides, oligopeptides, polypeptides which comprise naturally occurring altered (glycosylated, acylated, prenylated, phosphorylated, myristoylated, sulphated etc.) or non-naturally altered amino acid residues compared to the amino acid sequence of a naturally-occurring form of the polypeptide. A derivative may also comprise one or more non-amino acid substituents or additions compared to the amino acid sequence from which it is derived, for example a reporter molecule or other ligand, covalently or non-covalently bound to the amino acid sequence, such as a reporter molecule which is bound to facilitate its detection, and non-naturally occurring amino acid residues relative to the amino acid sequence of a naturally-occurring protein. Furthermore, “derivatives” also include fusions of the naturally-occurring form of the protein with tagging peptides such as FLAG, HIS6 or thioredoxin (for a review of tagging peptides, see Terpe, Appl. Microbiol. Biotechnol. 60, 523-533, 2003).

### Orthologue(s)/Paralogue(s)

[0030] Orthologues and paralogues encompass evolutionary concepts used to describe the ancestral relationships of genes. Paralogues are genes within the same species that have originated through duplication of an ancestral gene; orthologues are genes from different organisms that have originated through speciation, and are also derived from a common ancestral gene.

[0031] Domain, Motif/Consensus Sequence/Signature

[0032] The term “domain” refers to a set of amino acids conserved at specific positions along an alignment of sequences of evolutionarily related proteins. While amino acids at other positions can vary between homologues, amino acids that are highly conserved at specific positions indicate amino acids that are likely essential in the structure, stability or function of a protein. Identified by their high degree of conservation in aligned sequences of a family of protein homologues, they can be used as identifiers to determine if any polypeptide in question belongs to a previously identified polypeptide family.

[0033] The term “motif” or “consensus sequence” or “signature” refers to a short conserved region in the sequence of evolutionarily related proteins. Motifs are frequently highly conserved parts of domains, but may also include only part of the domain, or be located outside of conserved domain (if all of the amino acids of the motif fall outside of a defined domain).

[0034] Specialist databases exist for the identification of domains, for example, SMART (Schultz et al. (1998) Proc. Natl. Acad. Sci. USA 95, 5857-5864; Letunic et al. (2002) Nucleic Acids Res 30, 242-244), InterPro (Mulder et al., (2003) Nucl. Acids. Res. 31, 315-318), Prosite (Bucher and Bairoch (1994), A generalized profile syntax for biomolecular sequences motifs and its function in automatic sequence interpretation. (In) ISMB-94; Proceedings 2nd International Conference on Intelligent Systems for Molecular Biology. Altman R., Brutlag D., Karp P., Lathrop R., Searls D., Eds., pp 53-61, AAAI Press, Menlo Park; Hulo et al., Nucl. Acids. Res. 32:D134-D137, (2004)), or Pfam (Bateman et al., Nucleic Acids Research 30(1): 276-280 (2002)). A set of tools for in silico analysis of protein sequences is available on the ExPASy proteomics server (Swiss Institute of Bioinformatics (Gasteiger et al., ExPASy: the proteomics server for in-depth protein knowledge and analysis, Nucleic Acids Res. 31:3784-3788 (2003)). Domains or motifs may also be identified using routine techniques, such as by sequence alignment.

[0035] Methods for the alignment of sequences for comparison are well known in the art, such methods include GAP, BESTFIT, BLAST, FASTA and TFASTA. GAP uses the algorithm of Needleman and Wunsch ((1970) J Mol Biol 48: 443-453) to find the global (i.e. spanning the complete sequences) alignment of two sequences that maximizes the number of matches and minimizes the number of gaps. The BLAST algorithm (Altschul et al. (1990) J Mol Biol 215: 403-10) calculates percent sequence identity and performs a statistical analysis of the similarity between the two sequences. The software for performing BLAST analysis is publicly available through the National Centre for Biotechnology Information (NCBI). Homologues may readily be identified using, for example, the ClustalW multiple sequence alignment algorithm (version 1.83), with the default pairwise alignment parameters, and a scoring method in percentage. Global percentages of similarity and identity may also be determined using one of the methods available in the MatGAT software package (Campanella et al., BMC Bioinformatics. 2003 Jul. 10; 4:29. MatGAT: an application that generates similarity/identity matrices using protein or DNA sequences.). Minor manual editing may be performed to optimise alignment between conserved motifs, as would be apparent to a person skilled in the art. Furthermore, instead of using full-length sequences for the identification of homologues, specific domains may also be used. The sequence identity values may be determined over the entire nucleic acid or amino acid sequence or over selected domains or conserved motif(s), using the programs mentioned above using the default parameters. For local alignments, the Smith-Waterman algorithm is particularly useful (Smith T F, Waterman M S (1981) J. Mol. Biol 147(1);195-7).

### Reciprocal BLAST

[0036] Typically, this involves a first BLAST involving BLASTing a query sequence (for example using any of the sequences listed in Table A of the Examples section) against any sequence database, such as the publicly available NCBI database. BLASTN or TBLASTX (using standard default values) are generally used when starting from a nucleotide sequence, and BLASTP or TBLASTN (using standard default values) when starting from a protein sequence. The BLAST results may optionally be filtered. The full-length sequences of either the filtered results or non-filtered results are then BLASTed back (second BLAST) against sequences from the organism from which the query sequence is derived. The results of the first and second BLASTs are then compared. A paralogue is identified if a high-ranking hit from the first blast is from the same species as from which the query sequence is derived, a BLAST back then ideally results in the query sequence amongst the highest hits; an orthologue is identified if a high-ranking hit in the first BLAST is not from the same species as from which the query sequence is derived, and preferably results upon BLAST back in the query sequence being among the highest hits.

[0037] High-ranking hits are those having a low E-value. The lower the E-value, the more significant the score (or in other words the lower the chance that the hit was found by chance). Computation of the E-value is well known in the art. In addition to E-values, comparisons are also scored by percentage identity. Percentage identity refers to the number of identical nucleotides (or amino acids) between the two compared nucleic acid (or polypeptide) sequences over a particular length. In the case of large families, ClustalW may be used, followed by a neighbour joining tree, to help visualize clustering of related genes and to identify orthologues and paralogues.

### Hybridisation

[0038] The term “hybridisation” as defined herein is a process wherein substantially homologous complementary nucleotide sequences anneal to each other. The hybridisation process can occur entirely in solution, i.e. both complementary nucleic acids are in solution. The hybridisation process can also occur with one of the complementary nucleic acids immobilised to a matrix such as magnetic beads, Sepharose beads or any other resin. The hybridisation process can furthermore occur with one of the complementary nucleic acids immobilised to a solid support such as a nitro-cellulose or nylon membrane or immobilised by e.g. photolithography to, for example, a siliceous glass support (the latter known as nucleic acid arrays or microarrays or as nucleic acid chips). In order to allow hybridisation to occur, the nucleic acid molecules are generally thermally or chemically denatured to melt a double strand into two single strands and/or to remove hairpins or other secondary structures from single stranded nucleic acids.

[0039] The term “stringency” refers to the conditions under which a hybridisation takes place. The stringency of hybridisation is influenced by conditions such as temperature, salt concentration, ionic strength and hybridisation buffer composition. Generally, low stringency conditions are selected to be about 30° C. lower than the thermal melting point (Tₘ) for the specific sequence at a defined ionic strength and pH. Medium stringency conditions are when the temperature is 20° C. below Tₘ, and high stringency conditions are when the temperature is 10° C. below Tₘ. High stringency hybridisation conditions are typically used for isolating hybridising sequences that have high sequence similarity to the target nucleic acid sequence. However, nucleic acids may deviate in sequence and still encode a substantially identical polypeptide, due to the degeneracy of the genetic code. Therefore medium stringency hybridisation conditions may sometimes be needed to identify such nucleic acid molecules.

[0040] The Tm is the temperature under defined ionic strength and pH, at which 50% of the target sequence hybridises to a perfectly matched probe. The Tₘ is dependent upon the solution conditions and the base composition and length of the probe. For example, longer sequences hybridise specifically at higher temperatures. The maximum rate of hybridisation is obtained from about 16° C. up to 32° C. below Tₘ. The presence of monovalent cations in the hybridisation solution reduce the electrostatic repulsion between the two nucleic acid strands thereby promoting hybrid formation; this effect is visible for sodium concentrations of up to 0.4M (for higher concentrations, this effect may be ignored). Formamide reduces the melting temperature of DNA-DNA and DNA-RNA duplexes with 0.6 to 0.7° C. for each percent formamide, and addition of 50% formamide allows hybridisation to be performed at 30 to 45° C., though the rate of hybridisation will be lowered. Base pair mismatches reduce the hybridisation rate and the thermal stability of the duplexes. On average and for large probes, the Tm decreases about 1° C. per % base mismatch. The Tm may be calculated using the following equations, depending on the types of hybrids:

1) DNA-DNA Hybrids (Meinkoth and Wahl, Anal. Biochem., 138: 267-284, 1984):

Tₘ=81.5° C.+16.6×log₁₀[Na⁺]^{a}+0.41×%[G/C^{b}]−500×[L^{c}]⁻¹−0.61×% formamide

### 2) DNA-RNA or RNA-RNA Hybrids:

[0041] Tm=79.8+18.5(log₁₀[Na⁺]^{a})+0.58(% G/C^{b})+11.8(% G/C^{b})²−820/L^{c}

### 3) Oligo-DNA or Oligo-RNAs Hybrids:

[0042] For <20 nucleotides: Tₘ=2(Iₙ)

For 20-35 nucleotides: Tₘ=22+1.46(Iₙ)
[0043] ^{a} or for other monovalent cation, but only accurate in the 0.01-0.4 M range.
[0044] ^{b} only accurate for % GC in the 30% to 75% range.
[0045] ^{c} L=length of duplex in base pairs.
[0046] ^{d} oligo, oligonucleotide; Iₙ, =effective length of primer=2×(no. of G/C)+(no. of A/T).

[0047] Non-specific binding may be controlled using any one of a number of known techniques such as, for example, blocking the membrane with protein containing solutions, additions of heterologous RNA, DNA, and SDS to the hybridisation buffer, and treatment with Rnase. For non-homologous probes, a series of hybridizations may be performed by varying one of (i) progressively lowering the annealing temperature (for example from 68° C. to 42° C.) or (ii) progressively lowering the formamide concentration (for example from 50% to 0%). The skilled artisan is aware of various parameters which may be altered during hybridisation and which will either maintain or change the stringency conditions.

[0048] Besides the hybridisation conditions, specificity of hybridisation typically also depends on the function of post-hybridisation washes. To remove background resulting from non-specific hybridisation, samples are washed with dilute salt solutions. Critical factors of such washes include the ionic strength and temperature of the final wash solution: the lower the salt concentration and the higher the wash temperature, the higher the stringency of the wash. Wash conditions are typically performed at or below hybridisation stringency. A positive hybridisation gives a signal that is at least twice of that of the background. Generally, suitable stringent conditions for nucleic acid hybridisation assays or gene amplification detection procedures are as set forth above. More or less stringent conditions may also be selected. The skilled artisan is aware of various parameters which may be altered during washing and which will either maintain or change the stringency conditions.

[0049] For example, typical high stringency hybridisation conditions for DNA hybrids longer than 50 nucleotides encompass hybridisation at 65° C. in 1×SSC or at 42° C. in 1×SSC and 50% formamide, followed by washing at 65° C. in 0.3×SSC. Examples of medium stringency hybridisation conditions for DNA hybrids longer than 50 nucleotides encompass hybridisation at 50° C. in 4×SSC or at 40° C. in 6×SSC and 50% formamide, followed by washing at 50° C. in 2×SSC. The length of the hybrid is the anticipated length for the hybridising nucleic acid. When nucleic acids of known sequence are hybridised, the hybrid length may be determined by aligning the sequences and identifying the conserved regions described herein. 1×SSC is 0.15M NaCl and 15 mM sodium citrate; the hybridisation solution and wash solutions may additionally include 5×Denhardt's reagent, 0.5-1.0% SDS, 100 μg/ml denatured, fragmented salmon sperm DNA, 0.5% sodium pyrophosphate.

[0050] For the purposes of defining the level of stringency, reference can be made to Sambrook et al. (2001) Molecular Cloning: a laboratory manual, 3rd Edition, Cold Spring Harbor Laboratory Press, CSH, N.Y. or to Current Protocols in Molecular Biology, John Wiley & Sons, N.Y. (1989 and yearly updates).

### Splice Variant

[0051] The term “splice variant” as used herein encompasses variants of a nucleic acid sequence in which selected introns and/or exons have been excised, replaced, displaced or added, or in which introns have been shortened or lengthened. Such variants will be ones in which the biological activity of the protein is substantially retained; this may be achieved by selectively retaining functional segments of the protein. Such splice variants may be found in nature or may be manmade. Methods for predicting and isolating such splice variants are well known in the art (see for example Foissac and Schiex (2005) BMC Bioinformatics 6: 25).

### Allelic Variant

[0052] Alleles or allelic variants are alternative forms of a given gene, located at the same chromosomal position. Allelic variants encompass Single Nucleotide Polymorphisms (SNPs), as well as Small Insertion/Deletion Polymorphisms (INDELs). The size of INDELs is usually less than 100 bp. SNPs and INDELs form the largest set of sequence variants in naturally occurring polymorphic strains of most organisms.

### Endogenous Gene

[0053] Reference herein to an “endogenous” gene not only refers to the gene in question as found in a plant in its natural form (i.e., without there being any human intervention), but also refers to that same gene (or a substantially homologous nucleic acid/gene) in an isolated form subsequently (re)introduced into a plant (a transgene). For example, a transgenic plant containing such a transgene may encounter a substantial reduction of the transgene expression and/or substantial reduction of expression of the endogenous gene. The isolated gene may be isolated from an organism or may be manmade, for example by chemical synthesis.

### Gene Shuffling/Directed Evolution

[0054] Gene shuffling or directed evolution consists of iterations of DNA shuffling followed by appropriate screening and/or selection to generate variants of nucleic acids or portions thereof encoding proteins having a modified biological activity (Castle et al., (2004) Science 304(5674): 1151-4; U.S. Pat. Nos. 5,811,238 and 6,395,547).

### Construct

[0055] Additional regulatory elements may include transcriptional as well as translational enhancers. Those skilled in the art will be aware of terminator and enhancer sequences that may be suitable for use in performing the invention. An intron sequence may also be added to the 5′ untranslated region (UTR) or in the coding sequence to increase the amount of the mature message that accumulates in the cytosol, as described in the definitions section. Other control sequences (besides promoter, enhancer, silencer, intron sequences, 3′UTR and/or 5′UTR regions) may be protein and/or RNA stabilizing elements. Such sequences would be known or may readily be obtained by a person skilled in the art.

[0056] The genetic constructs of the invention may further include an origin of replication sequence that is required for maintenance and/or replication in a specific cell type. One example is when a genetic construct is required to be maintained in a bacterial cell as an episomal genetic element (e.g. plasmid or cosmid molecule). Preferred origins of replication include, but are not limited to, the f1-ori and colE1.

[0057] For the detection of the successful transfer of the nucleic acid sequences as used in the methods of the invention and/or selection of transgenic plants comprising these nucleic acids, it is advantageous to use marker genes (or reporter genes). Therefore, the genetic construct may optionally comprise a selectable marker gene. Selectable markers are described in more detail in the “definitions” section herein. The marker genes may be removed or excised from the transgenic cell once they are no longer needed. Techniques for marker removal are known in the art, useful techniques are described above in the definitions section.

### Regulatory Element/Control Sequence/Promoter

[0058] The terms “regulatory element”, “control sequence” and “promoter” are all used interchangeably herein and are to be taken in a broad context to refer to regulatory nucleic acid sequences capable of effecting expression of the sequences to which they are ligated. The term “promoter” typically refers to a nucleic acid control sequence located upstream from the transcriptional start of a gene and which is involved in recognising and binding of RNA polymerase and other proteins, thereby directing transcription of an operably linked nucleic acid. Encompassed by the aforementioned terms are transcriptional regulatory sequences derived from a classical eukaryotic genomic gene (including the TATA box which is required for accurate transcription initiation, with or without a CCAAT box sequence) and additional regulatory elements (i.e. upstream activating sequences, enhancers and silencers) which alter gene expression in response to developmental and/or external stimuli, or in a tissue-specific manner. Also included within the term is a transcriptional regulatory sequence of a classical prokaryotic gene, in which case it may include a −35 box sequence and/or −10 box transcriptional regulatory sequences. The term “regulatory element” also encompasses a synthetic fusion molecule or derivative that confers, activates or enhances expression of a nucleic acid molecule in a cell, tissue or organ.

[0059] A “plant promoter” comprises regulatory elements, which mediate the expression of a coding sequence segment in plant cells. Accordingly, a plant promoter need not be of plant origin, but may originate from viruses or micro-organisms, for example from viruses which attack plant cells. The “plant promoter” can also originate from a plant cell, e.g. from the plant which is transformed with the nucleic acid sequence to be expressed in the inventive process and described herein. This also applies to other “plant” regulatory signals, such as “plant” terminators. The promoters upstream of the nucleotide sequences useful in the methods of the present invention can be modified by one or more nucleotide substitution(s), insertion(s) and/or deletion(s) without interfering with the functionality or activity of either the promoters, the open reading frame (ORF) or the 3′-regulatory region such as terminators or other 3′ regulatory regions which are located away from the ORF. It is furthermore possible that the activity of the promoters is increased by modification of their sequence, or that they are replaced completely by more active promoters, even promoters from heterologous organisms. For expression in plants, the nucleic acid molecule must, as described above, be linked operably to or comprise a suitable promoter which expresses the gene at the right point in time and with the required spatial expression pattern.

[0060] For the identification of functionally equivalent promoters, the promoter strength and/or expression pattern of a candidate promoter may be analysed for example by operably linking the promoter to a reporter gene and assaying the expression level and pattern of the reporter gene in various tissues of the plant. Suitable well-known reporter genes include for example beta-glucuronidase or beta-galactosidase. The promoter activity is assayed by measuring the enzymatic activity of the beta-glucuronidase or beta-galactosidase. The promoter strength and/or expression pattern may then be compared to that of a reference promoter (such as the one used in the methods of the present invention). Alternatively, promoter strength may be assayed by quantifying mRNA levels or by comparing mRNA levels of the nucleic acid used in the methods of the present invention, with mRNA levels of housekeeping genes such as 18S rRNA, using methods known in the art, such as Northern blotting with densitometric analysis of autoradiograms, quantitative real-time PCR or RT-PCR (Heid et al., 1996 Genome Methods 6: 986-994). Generally by “weak promoter” is intended a promoter that drives expression of a coding sequence at a low level. By “low level” is intended at levels of about 1/10,000 transcripts to about 1/100,000 transcripts, to about 1/500,0000 transcripts per cell. Conversely, a “strong promoter” drives expression of a coding sequence at high level, or at about 1/10 transcripts to about 1/100 transcripts to about 1/1000 transcripts per cell. Generally, by “medium strength promoter” is intended a promoter that drives expression of a coding sequence at a lower level than a strong promoter, in particular at a level that is in all instances below that obtained when under the control of a 35S CaMV promoter.

### Operably Linked

[0061] The term “operably linked” as used herein refers to a functional linkage between the promoter sequence and the gene of interest, such that the promoter sequence is able to initiate transcription of the gene of interest.

### Constitutive Promoter

[0062] A “constitutive promoter” refers to a promoter that is transcriptionally active during most, but not necessarily all, phases of growth and development and under most environmental conditions, in at least one cell, tissue or organ. Table 2a below gives examples of constitutive promoters.

TABLE 2a
Examples of constitutive promoters

| Gene Source | Reference |
|---|---|
| Actin | McElroy et al, Plant Cell, 2: 163-171, 1990 |
| HMGP | WO 2004/070039 |
| CAMV 35S | Odell et al, Nature, 313: 810-812, 1985 |
| CaMV 19S | Nilsson et al., Physiol. Plant. 100: 456-462, 1997 |
| GOS2 | de Pater et al, Plant J Nov; 2(6): 837-44, 1992, |
| | WO 2004/065596 |
| Ubiquitin | Christensen et al, Plant Mol. Biol. 18: 675-689, 1992 |
| Rice cyclophilin | Buchholz et al, Plant Mol Biol. 25(5): 837-43, 1994 |
| Maize H3 histone | Lepetit et al, Mol. Gen. Genet. 231: 276-285, 1992 |
| Alfalfa H3 | Wu et al. Plant Mol. Biol. 11: 641-649, 1988 |
| histone | |
| Actin 2 | An et al, Plant J. 10(1); 107-121, 1996 |
| 34S FMV | Sanger et al., Plant. Mol. Biol., 14, 1990: 433-443 |
| Rubisco small | U.S. Pat. No. 4,962,028 |
| subunit | |
| OCS | Leisner (1988) Proc Natl Acad Sci USA 85(5): 2553 |
| SAD1 | Jain et al., Crop Science, 39 (6), 1999: 1696 |
| SAD2 | Jain et al., Crop Science, 39 (6), 1999: 1696 |
| nos | Shaw et al. (1984) Nucleic Acids Res. 12(20): |
| | 7831-7846 |
| V-ATPase | WO 01/14572 |
| Super promoter | WO 95/14098 |
| G-box proteins | WO 94/12015 |

### Ubiquitous Promoter

[0063] A ubiquitous promoter is active in substantially all tissues or cells of an organism.

### Developmentally-Regulated Promoter

[0064] A developmentally-regulated promoter is active during certain developmental stages or in parts of the plant that undergo developmental changes.

### Inducible Promoter

[0065] An inducible promoter has induced or increased transcription initiation in response to a chemical (for a review see Gatz 1997, Annu. Rev. Plant Physiol. Plant Mol. Biol., 48:89-108), environmental or physical stimulus, or may be “stress-inducible”, i.e. activated when a plant is exposed to various stress conditions, or a “pathogen-inducible” i.e. activated when a plant is exposed to exposure to various pathogens.

### Organ-Specific/Tissue-Specific Promoter

[0066] An organ-specific or tissue-specific promoter is one that is capable of preferentially initiating transcription in certain organs or tissues, such as the leaves, roots, seed tissue etc. For example, a “root-specific promoter” is a promoter that is transcriptionally active predominantly in plant roots, substantially to the exclusion of any other parts of a plant, whilst still allowing for any leaky expression in these other plant parts. Promoters able to initiate transcription in certain cells only are referred to herein as “cell-specific”.

[0067] Examples of root-specific promoters are listed in Table 2b below:

TABLE 2b
Examples of root-specific promoters

| Gene Source | Reference |
|---|---|
| RCc3 | Plant Mol Biol. 1995 Jan; 27(2): 237-48 |
| Arabidopsis PHT1 | Kovama et al., 2005; Mudge et al. (2002, |
| | Plant J. 31: 341) |
| Medicago phosphate | Xiao et al., 2006 |
| transporter | |
| Arabidopsis Pyk10 | Nitz et al. (2001) Plant Sci 161(2): 337-346 |
| root-expressible genes | Tingey et al., EMBO J. 6: 1, 1987. |
| tobacco auxin-inducible | Van der Zaal et al., Plant Mol. Biol. 16, 983, |
| gene | 1991. |
| β-tubulin | Oppenheimer, et al., Gene 63: 87, 1988. |
| tobacco root-specific | Conkling, et al., Plant Physiol. 93: 1203, 1990. |
| genes | |
| B. napus G1-3b gene | U.S. Pat. No. 5,401,836 |
| SbPRP1 | Suzuki et al., Plant Mol. Biol. 21: 109-119, |
| | 1993. |
| LRX1 | Baumberger et al. 2001, Genes & Dev. 15: |
| | 1128 |
| BTG-26 Brassica napus | US 20050044585 |
| LeAMT1 (tomato) | Lauter et al. (1996, PNAS 3: 8139) |
| The LeNRT1-1 (tomato) | Lauter et al. (1996, PNAS 3: 8139) |
| class I patatin gene | Liu et al., Plant Mol. Biol. 153: 386-395, 1991. |
| (potato) | |
| KDC1 (Daucus carota) | Downey et al. (2000, J. Biol. Chem. 275: |
| | 39420) |
| TobRB7 gene | W Song (1997) PhD Thesis, North Carolina |
| | State University, Raleigh, NC USA |
| OsRAB5a (rice) | Wang et al. 2002, Plant Sci. 163: 273 |
| ALF5 (Arabidopsis) | Diener et al. (2001, Plant Cell 13: 1625) |
| NRT2; 1Np | Quesada et al. (1997, Plant Mol. Biol. 34: 265) |
| (N. plumbaginifolia) | |

[0068] A seed-specific promoter is transcriptionally active predominantly in seed tissue, but not necessarily exclusively in seed tissue (in cases of leaky expression). The seed-specific promoter may be active during seed development and/or during germination. The seed specific promoter may be endosperm/aleurone/embryo specific. Examples of seed-specific promoters (endosperm/aleurone/embryo specific) are shown in Table 2c to Table 2f below. Further examples of seed-specific promoters are given in Qing Qu and Takaiwa (Plant Biotechnol. J. 2, 113-125, 2004), which disclosure is incorporated by reference herein as if fully set forth.

TABLE 2c
Examples of seed-specific promoters

| Gene source | Reference |
|---|---|
| seed-specific genes | Simon et al., Plant Mol. Biol. 5: 191, 1985; |
| | Scofield et al., J. Biol. Chem. 262: 12202, 1987.; |
| | Baszczynski et al., Plant Mol. Biol. 14: 633, 1990. |
| Brazil Nut albumin | Pearson et al., Plant Mol. Biol. 18: 235-245, 1992. |
| legumin | Ellis et al., Plant Mol. Biol. 10: 203-214, 1988. |
| glutelin (rice) | Takaiwa et al., Mol. Gen. Genet. 208: 15-22, 1986; |
| | Takaiwa et al., FEBS Letts. 221: 43-47, 1987. |
| zein | Matzke et al Plant Mol Biol, 14(3): 323-32 1990 |
| napA | Stalberg et al, Planta 199: 515-519, 1996. |
| wheat LMW and | Mol Gen Genet 216: 81-90, 1989; NAR 17: |
| HMW glutenin-1 | 461-2, 1989 |
| wheat SPA | Albani et al, Plant Cell, 9: 171-184, 1997 |
| wheat α, β, | EMBO J. 3: 1409-15, 1984 |
| γ-gliadins | |
| barley Itr1 promoter | Diaz et al. (1995) Mol Gen Genet 248(5): 592-8 |
| barley B1, C, D, | Theor Appl Gen 98: 1253-62, 1999; Plant J 4: |
| hordein | 343-55, 1993; Mol Gen Genet 250: 750-60, 1996 |
| barley DOF | Mena et al, The Plant Journal, 116(1): 53-62, 1998 |
| blz2 | EP99106056.7 |
| synthetic promoter | Vicente-Carbajosa et al., Plant J. 13: 629-640, 1998. |
| rice prolamin | Wu et al, Plant Cell Physiology 39(8) 885-889, 1998 |
| NRP33 | |
| rice a-globulin | Wu et al, Plant Cell Physiology 39(8) 885-889, 1998 |
| Glb-1 | |
| rice OSH1 | Sato et al, Proc. Natl. Acad. Sci. USA, 93: |
| | 8117-8122, 1996 |
| rice α-globulin | Nakase et al. Plant Mol. Biol. 33: 513-522, 1997 |
| REB/OHP-1 | |
| rice ADP-glucose | Trans Res 6: 157-68, 1997 |
| pyrophosphorylase | |
| maize ESR gene | Plant J 12: 235-46, 1997 |
| family | |
| sorghum α-kafirin | DeRose et al., Plant Mol. Biol 32: 1029-35, 1996 |
| KNOX | Postma-Haarsma et al, Plant Mol. Biol. 39: 257-71, |
| | 1999 |
| rice oleosin | Wu et al, J. Biochem. 123: 386, 1998 |
| sunflower oleosin | Cummins et al., Plant Mol. Biol. 19: 873-876, 1992 |
| PRO0117, putative | WO 2004/070039 |
| rice 40S | |
| ribosomal protein | |
| PRO0136, rice | unpublished |
| alanine | |
| aminotransferase | |
| PRO0147, trypsin | unpublished |
| inhibitor ITR1 | |
| (barley) | |
| PRO0151, rice | WO 2004/070039 |
| WSI18 | |
| PRO0175, rice | WO 2004/070039 |
| RAB21 | |
| PRO005 | WO 2004/070039 |
| PRO0095 | WO 2004/070039 |
| α-amylase | Lanahan et al, Plant Cell 4: 203-211, 1992; |
| (Amy32b) | Skriver et al, Proc Natl Acad Sci USA 88: |
| | 7266-7270, 1991 |
| cathepsin β-like | Cejudo et al, Plant Mol Biol 20: 849-856, 1992 |
| gene | |
| Barley Ltp2 | Kalla et al., Plant J. 6: 849-60, 1994 |
| Chi26 | Leah et al., Plant J. 4: 579-89, 1994 |
| Maize B-Peru | Selinger et al., Genetics 149; 1125-38, 1998 |

TABLE 2d
examples of endosperm-specific promoters

| Gene source | Reference |
|---|---|
| glutelin (rice) | Takaiwa et al. (1986) Mol Gen Genet 208: 15-22; |
| | Takaiwa et al. (1987) FEBS Letts. 221: 43-47 |
| zein | Matzke et al., (1990) Plant Mol Biol 14(3): 323-32 |
| wheat LMW and | Colot et al. (1989) Mol Gen Genet 216: 81-90, |
| HMW glutenin-1 | Anderson et al. (1989) NAR 17: 461-2 |
| wheat SPA | Albani et al. (1997) Plant Cell 9: 171-184 |
| wheat gliadins | Rafalski et al. (1984) EMBO 3: 1409-15 |
| barley Itr1 promoter | Diaz et al. (1995) Mol Gen Genet 248(5): 592-8 |
| barley B1, C, D, | Cho et al. (1999) Theor Appl Genet 98: 1253-62; |
| hordein | Muller et al. (1993) Plant J 4: 343-55; |
| | Sorenson et al. (1996) Mol Gen Genet 250: 750-60 |
| barley DOF | Mena et al, (1998) Plant J 116(1): 53-62 |
| blz2 | Onate et al. (1999) J Biol Chem 274(14): 9175-82 |
| synthetic promoter | Vicente-Carbajosa et al. (1998) Plant J 13: 629-640 |
| rice prolamin | Wu et al, (1998) Plant Cell Physiol 39(8) 885-889 |
| NRP33 | |
| rice globulin Glb-1 | Wu et al. (1998) Plant Cell Physiol 39(8) 885-889 |
| rice globulin | Nakase et al. (1997) Plant Molec Biol 33: 513-522 |
| REB/OHP-1 | |
| rice ADP-glucose | Russell et al. (1997) Trans Res 6: 157-68 |
| pyrophosphorylase | |
| maize ESR gene | Opsahl-Ferstad et al. (1997) Plant J 12: 235-46 |
| family | |
| sorghum kafirin | DeRose et al. (1996) Plant Mol Biol 32: 1029-35 |

TABLE 2e
Examples of embryo specific promoters:

| Gene | |
|---|---|
| source | Reference |
| rice OSH1 | Sato et al, Proc. Natl. Acad. Sci. USA, 93: 8117-8122, 1996 |
| KNOX | Postma-Haarsma et al, Plant Mol. Biol. 39: 257-71, 1999 |
| PRO0151 | WO 2004/070039 |
| PRO0175 | WO 2004/070039 |
| PRO005 | WO 2004/070039 |
| PRO0095 | WO 2004/070039 |

TABLE 2f
Examples of aleurone-specific promoters:

| Gene source | Reference |
|---|---|
| α-amylase (Amy32b) | Lanahan et al, Plant Cell 4: 203-211, 1992; |
| | Skriver et al, Proc Natl Acad Sci USA 88: |
| | 7266-7270, 1991 |
| cathepsin β-like gene | Cejudo et al, Plant Mol Biol 20: 849-856, 1992 |
| Barley Ltp2 | Kalla et al., Plant J. 6: 849-60, 1994 |
| Chi26 | Leah et al., Plant J. 4: 579-89, 1994 |
| Maize B-Peru | Selinger et al., Genetics 149; 1125-38, 1998 |

[0069] A green tissue-specific promoter as defined herein is a promoter that is transcriptionally active predominantly in green tissue, substantially to the exclusion of any other parts of a plant, whilst still allowing for any leaky expression in these other plant parts.

[0070] Examples of green tissue-specific promoters which may be used to perform the methods of the invention are shown in Table 2g below.

TABLE 2g
Examples of green tissue-specific promoters

| Gene | Expression | Reference |
|---|---|---|
| Maize Orthophosphate | Leaf specific | Fukavama et al., 2001 |
| dikinase | | |
| Maize Phosphoenolpyruvate | Leaf specific | Kausch et al., 2001 |
| carboxylase | | |
| Rice Phosphoenolpyruvate | Leaf specific | Liu et al., 2003 |
| carboxylase | | |
| Rice small subunit Rubisco | Leaf specific | Nomura et al., 2000 |
| rice beta expansin EXBP9 | Shoot specific | WO 2004/070039 |
| Pigeonpea small subunit | Leaf specific | Panguluri et al., 2005 |
| Rubisco | | |
| Pea RBCS3A | Leaf specific | |

[0071] Another example of a tissue-specific promoter is a meristem-specific promoter, which is transcriptionally active predominantly in meristematic tissue, substantially to the exclusion of any other parts of a plant, whilst still allowing for any leaky expression in these other plant parts. Examples of green meristem-specific promoters which may be used to perform the methods of the invention are shown in Table 2h below.

TABLE 2h
Examples of meristem-specific promoters

| Gene source | Expression pattern | Reference |
|---|---|---|
| rice OSH1 | Shoot apical meristem, | Sato et al. (1996) Proc. |
| | from embryo globular stage | Natl. Acad. Sci. USA, |
| | to seedling stage | 93: 8117-8122 |
| Rice | Meristem specific | BAD87835.1 |
| metallothionein | | |
| WAK1 & | Shoot and root apical | Wagner & Kohorn (2001) |
| WAK 2 | meristems, and in | Plant Cell 13(2): 303-318 |
| | expanding leaves and | |
| | sepals | |

### Terminator

[0072] The term “terminator” encompasses a control sequence which is a DNA sequence at the end of a transcriptional unit which signals 3′ processing and polyadenylation of a primary transcript and termination of transcription. The terminator can be derived from the natural gene, from a variety of other plant genes, or from T-DNA. The terminator to be added may be derived from, for example, the nopaline synthase or octopine synthase genes, or alternatively from another plant gene, or less preferably from any other eukaryotic gene.

### Selectable Marker (Gene)/Reporter Gene

[0073] “Selectable marker”, “selectable marker gene” or “reporter gene” includes any gene that confers a phenotype on a cell in which it is expressed to facilitate the identification and/or selection of cells that are transfected or transformed with a nucleic acid construct of the invention. These marker genes enable the identification of a successful transfer of the nucleic acid molecules via a series of different principles. Suitable markers may be selected from markers that confer antibiotic or herbicide resistance, that introduce a new metabolic trait or that allow visual selection. Examples of selectable marker genes include genes conferring resistance to antibiotics (such as nptII that phosphorylates neomycin and kanamycin, or hpt, phosphorylating hygromycin, or genes conferring resistance to, for example, bleomycin, streptomycin, tetracyclin, chloramphenicol, ampicillin, gentamycin, geneticin (G418), spectinomycin or blasticidin), to herbicides (for example bar which provides resistance to Basta®; aroA or gox providing resistance against glyphosate, or the genes conferring resistance to, for example, imidazolinone, phosphinothricin or sulfonylurea), or genes that provide a metabolic trait (such as manA that allows plants to use mannose as sole carbon source or xylose isomerase for the utilisation of xylose, or antinutritive markers such as the resistance to 2-deoxyglucose). Expression of visual marker genes results in the formation of colour (for example β-glucuronidase, GUS or β-galactosidase with its coloured substrates, for example X-Gal), luminescence (such as the luciferin/luceferase system) or fluorescence (Green Fluorescent Protein, GFP, and derivatives thereof). This list represents only a small number of possible markers. The skilled worker is familiar with such markers. Different markers are preferred, depending on the organism and the selection method.

[0074] It is known that upon stable or transient integration of nucleic acids into plant cells, only a minority of the cells takes up the foreign DNA and, if desired, integrates it into its genome, depending on the expression vector used and the transfection technique used. To identify and select these integrants, a gene coding for a selectable marker (such as the ones described above) is usually introduced into the host cells together with the gene of interest. These markers can for example be used in mutants in which these genes are not functional by, for example, deletion by conventional methods. Furthermore, nucleic acid molecules encoding a selectable marker can be introduced into a host cell on the same vector that comprises the sequence encoding the polypeptides of the invention or used in the methods of the invention, or else in a separate vector. Cells which have been stably transfected with the introduced nucleic acid can be identified for example by selection (for example, cells which have integrated the selectable marker survive whereas the other cells die).

[0075] Since the marker genes, particularly genes for resistance to antibiotics and herbicides, are no longer required or are undesired in the transgenic host cell once the nucleic acids have been introduced successfully, the process according to the invention for introducing the nucleic acids advantageously employs techniques which enable the removal or excision of these marker genes. One such a method is what is known as co-transformation. The co-transformation method employs two vectors simultaneously for the transformation, one vector bearing the nucleic acid according to the invention and a second bearing the marker gene(s). A large proportion of transformants receives or, in the case of plants, comprises (up to 40% or more of the transformants), both vectors. In case of transformation with Agrobacteria, the transformants usually receive only a part of the vector, i.e. the sequence flanked by the T-DNA, which usually represents the expression cassette. The marker genes can subsequently be removed from the transformed plant by performing crosses. In another method, marker genes integrated into a transposon are used for the transformation together with desired nucleic acid (known as the Ac/Ds technology). The transformants can be crossed with a transposase source or the transformants are transformed with a nucleic acid construct conferring expression of a transposase, transiently or stable. In some cases (approx. 10%), the transposon jumps out of the genome of the host cell once transformation has taken place successfully and is lost. In a further number of cases, the transposon jumps to a different location. In these cases the marker gene must be eliminated by performing crosses. In microbiology, techniques were developed which make possible, or facilitate, the detection of such events. A further advantageous method relies on what is known as recombination systems; whose advantage is that elimination by crossing can be dispensed with. The best-known system of this type is what is known as the Cre/lox system. Cre1 is a recombinase that removes the sequences located between the loxP sequences. If the marker gene is integrated between the loxP sequences, it is removed once transformation has taken place successfully, by expression of the recombinase. Further recombination systems are the HIN/HIX, FLP/FRT and REP/STB system (Tribble et al., J. Biol. Chem., 275, 2000: 22255-22267; Velmurugan et al., J. Cell Biol., 149, 2000: 553-566). A site-specific integration into the plant genome of the nucleic acid sequences according to the invention is possible. Naturally, these methods can also be applied to microorganisms such as yeast, fungi or bacteria.

### Transgenic/Transgene/Recombinant

[0076] For the purposes of the invention, “transgenic”, “transgene” or “recombinant” means with regard to, for example, a nucleic acid sequence, an expression cassette, gene construct or a vector comprising the nucleic acid sequence or an organism transformed with the nucleic acid sequences, expression cassettes or vectors according to the invention, all those constructions brought about by recombinant methods in which either
[0077] (a) the nucleic acid sequences encoding proteins useful in the methods of the invention, or
[0078] (b) genetic control sequence(s) which is operably linked with the nucleic acid sequence according to the invention, for example a promoter, or
[0079] (c) a) and b)
   are not located in their natural genetic environment or have been modified by recombinant methods, it being possible for the modification to take the form of, for example, a substitution, addition, deletion, inversion or insertion of one or more nucleotide residues. The natural genetic environment is understood as meaning the natural genomic or chromosomal locus in the original plant or the presence in a genomic library. In the case of a genomic library, the natural genetic environment of the nucleic acid sequence is preferably retained, at least in part. The environment flanks the nucleic acid sequence at least on one side and has a sequence length of at least 50 bp, preferably at least 500 bp, especially preferably at least 1000 bp, most preferably at least 5000 bp. A naturally occurring expression cassette—for example the naturally occurring combination of the natural promoter of the nucleic acid sequences with the corresponding nucleic acid sequence encoding a polypeptide useful in the methods of the present invention, as defined above—becomes a transgenic expression cassette when this expression cassette is modified by non-natural, synthetic (“artificial”) methods such as, for example, mutagenic treatment. Suitable methods are described, for example, in U.S. Pat. No. 5,565,350 or WO 00/15815.

[0080] A transgenic plant for the purposes of the invention is thus understood as meaning, as above, that the nucleic acids used in the method of the invention are not at their natural locus in the genome of said plant, it being possible for the nucleic acids to be expressed homologously or heterologously. However, as mentioned, transgenic also means that, while the nucleic acids according to the invention or used in the inventive method are at their natural position in the genome of a plant, the sequence has been modified with regard to the natural sequence, and/or that the regulatory sequences of the natural sequences have been modified. Transgenic is preferably understood as meaning the expression of the nucleic acids according to the invention at an unnatural locus in the genome, i.e. homologous or, preferably, heterologous expression of the nucleic acids takes place. Preferred transgenic plants are mentioned herein.

### Modulation

[0081] The term “modulation” means in relation to expression or gene expression, a process in which the expression level is changed by said gene expression in comparison to the control plant, the expression level may be increased or decreased. The original, unmodulated expression may be of any kind of expression of a structural RNA (rRNA, tRNA) or mRNA with subsequent translation. The term “modulating the activity” shall mean any change of the expression of the inventive nucleic acid sequences or encoded proteins, which leads to increased yield and/or increased growth of the plants.

### Expression

[0082] The term “expression” or “gene expression” means the transcription of a specific gene or specific genes or specific genetic construct. The term “expression” or “gene expression” in particular means the transcription of a gene or genes or genetic construct into structural RNA (rRNA, tRNA) or mRNA with or without subsequent translation of the latter into a protein. The process includes transcription of DNA and processing of the resulting mRNA product.

### Increased Expression/Overexpression

[0083] The term “increased expression” or “overexpression” as used herein means any form of expression that is additional to the original wild-type expression level.

[0084] Methods for increasing expression of genes or gene products are well documented in the art and include, for example, overexpression driven by appropriate promoters, the use of transcription enhancers or translation enhancers. Isolated nucleic acids which serve as promoter or enhancer elements may be introduced in an appropriate position (typically upstream) of a non-heterologous form of a polynucleotide so as to upregulate expression of a nucleic acid encoding the polypeptide of interest. For example, endogenous promoters may be altered in vivo by mutation, deletion, and/or substitution (see, Kmiec, U.S. Pat. No. 5,565,350; Zarling et al., WO9322443), or isolated promoters may be introduced into a plant cell in the proper orientation and distance from a gene of the present invention so as to control the expression of the gene.

[0085] If polypeptide expression is desired, it is generally desirable to include a polyadenylation region at the 3′-end of a polynucleotide coding region. The polyadenylation region can be derived from the natural gene, from a variety of other plant genes, or from T-DNA. The 3′ end sequence to be added may be derived from, for example, the nopaline synthase or octopine synthase genes, or alternatively from another plant gene, or less preferably from any other eukaryotic gene.

[0086] An intron sequence may also be added to the 5′ untranslated region (UTR) or the coding sequence of the partial coding sequence to increase the amount of the mature message that accumulates in the cytosol. Inclusion of a spliceable intron in the transcription unit in both plant and animal expression constructs has been shown to increase gene expression at both the mRNA and protein levels up to 1000-fold (Buchman and Berg (1988) Mol. Cell biol. 8: 4395-4405; Callis et al. (1987) Genes Dev 1:1183-1200). Such intron enhancement of gene expression is typically greatest when placed near the 5′ end of the transcription unit. Use of the maize introns Adh1-S intron 1, 2, and 6, the Bronze-1 intron are known in the art. For general information see: The Maize Handbook, Chapter 116, Freeling and Walbot, Eds., Springer, N.Y. (1994).

### Decreased Expression

[0087] Reference herein to “decreased expression” or “reduction or substantial elimination” of expression is taken to mean a decrease in endogenous gene expression and/or polypeptide levels and/or polypeptide activity relative to control plants. The reduction or substantial elimination is in increasing order of preference at least 10%, 20%, 30%, 40% or 50%, 60%, 70%, 80%, 85%, 90%, or 95%, 96%, 97%, 98%, 99% or more reduced compared to that of control plants.

[0088] For the reduction or substantial elimination of expression an endogenous gene in a plant, a sufficient length of substantially contiguous nucleotides of a nucleic acid sequence is required. In order to perform gene silencing, this may be as little as 20, 19, 18, 17, 16, 15, 14, 13, 12, 11, 10 or fewer nucleotides, alternatively this may be as much as the entire gene (including the 5′ and/or 3′ UTR, either in part or in whole). The stretch of substantially contiguous nucleotides may be derived from the nucleic acid encoding the protein of interest (target gene), or from any nucleic acid capable of encoding an orthologue, paralogue or homologue of the protein of interest. Preferably, the stretch of substantially contiguous nucleotides is capable of forming hydrogen bonds with the target gene (either sense or antisense strand), more preferably, the stretch of substantially contiguous nucleotides has, in increasing order of preference, 50%, 60%, 70%, 80%, 85%, 90%, 95%, 96%, 97%, 98%, 99%, 100% sequence identity to the target gene (either sense or antisense strand). A nucleic acid sequence encoding a (functional) polypeptide is not a requirement for the various methods discussed herein for the reduction or substantial elimination of expression of an endogenous gene.

[0089] This reduction or substantial elimination of expression may be achieved using routine tools and techniques. A preferred method for the reduction or substantial elimination of endogenous gene expression is by introducing and expressing in a plant a genetic construct into which the nucleic acid (in this case a stretch of substantially contiguous nucleotides derived from the gene of interest, or from any nucleic acid capable of encoding an orthologue, paralogue or homologue of any one of the protein of interest) is cloned as an inverted repeat (in part or completely), separated by a spacer (non-coding DNA).

[0090] In such a preferred method, expression of the endogenous gene is reduced or substantially eliminated through RNA-mediated silencing using an inverted repeat of a nucleic acid or a part thereof (in this case a stretch of substantially contiguous nucleotides derived from the gene of interest, or from any nucleic acid capable of encoding an orthologue, paralogue or homologue of the protein of interest), preferably capable of forming a hairpin structure. The inverted repeat is cloned in an expression vector comprising control sequences. A non-coding DNA nucleic acid sequence (a spacer, for example a matrix attachment region fragment (MAR), an intron, a polylinker, etc.) is located between the two inverted nucleic acids forming the inverted repeat. After transcription of the inverted repeat, a chimeric RNA with a self-complementary structure is formed (partial or complete). This double-stranded RNA structure is referred to as the hairpin RNA (hpRNA). The hpRNA is processed by the plant into siRNAs that are incorporated into an RNA-induced silencing complex (RISC). The RISC further cleaves the mRNA transcripts, thereby substantially reducing the number of mRNA transcripts to be translated into polypeptides. For further general details see for example, Grierson et al. (1998) WO 98/53083; Waterhouse et al. (1999) WO 99/53050).

[0091] Performance of the methods of the invention does not rely on introducing and expressing in a plant a genetic construct into which the nucleic acid is cloned as an inverted repeat, but any one or more of several well-known “gene silencing” methods may be used to achieve the same effects.

[0092] One such method for the reduction of endogenous gene expression is RNA-mediated silencing of gene expression (downregulation). Silencing in this case is triggered in a plant by a double stranded RNA sequence (dsRNA) that is substantially similar to the target endogenous gene. This dsRNA is further processed by the plant into about 20 to about 26 nucleotides called short interfering RNAs (siRNAs). The siRNAs are incorporated into an RNA-induced silencing complex (RISC) that cleaves the mRNA transcript of the endogenous target gene, thereby substantially reducing the number of mRNA transcripts to be translated into a polypeptide. Preferably, the double stranded RNA sequence corresponds to a target gene.

[0093] Another example of an RNA silencing method involves the introduction of nucleic acid sequences or parts thereof (in this case a stretch of substantially contiguous nucleotides derived from the gene of interest, or from any nucleic acid capable of encoding an orthologue, paralogue or homologue of the protein of interest) in a sense orientation into a plant. “Sense orientation” refers to a DNA sequence that is homologous to an mRNA transcript thereof. Introduced into a plant would therefore be at least one copy of the nucleic acid sequence. The additional nucleic acid sequence will reduce expression of the endogenous gene, giving rise to a phenomenon known as co-suppression. The reduction of gene expression will be more pronounced if several additional copies of a nucleic acid sequence are introduced into the plant, as there is a positive correlation between high transcript levels and the triggering of co-suppression.

[0094] Another example of an RNA silencing method involves the use of antisense nucleic acid sequences. An “antisense” nucleic acid sequence comprises a nucleotide sequence that is complementary to a “sense” nucleic acid sequence encoding a protein, i.e. complementary to the coding strand of a double-stranded cDNA molecule or complementary to an mRNA transcript sequence. The antisense nucleic acid sequence is preferably complementary to the endogenous gene to be silenced. The complementarity may be located in the “coding region” and/or in the “non-coding region” of a gene. The term “coding region” refers to a region of the nucleotide sequence comprising codons that are translated into amino acid residues. The term “non-coding region” refers to 5′ and 3′ sequences that flank the coding region that are transcribed but not translated into amino acids (also referred to as 5′ and 3′ untranslated regions).

[0095] Antisense nucleic acid sequences can be designed according to the rules of Watson and Crick base pairing. The antisense nucleic acid sequence may be complementary to the entire nucleic acid sequence (in this case a stretch of substantially contiguous nucleotides derived from the gene of interest, or from any nucleic acid capable of encoding an orthologue, paralogue or homologue of the protein of interest), but may also be an oligonucleotide that is antisense to only a part of the nucleic acid sequence (including the mRNA 5′ and 3′ UTR). For example, the antisense oligonucleotide sequence may be complementary to the region surrounding the translation start site of an mRNA transcript encoding a polypeptide. The length of a suitable antisense oligonucleotide sequence is known in the art and may start from about 50, 45, 40, 35, 30, 25, 20, 15 or 10 nucleotides in length or less. An antisense nucleic acid sequence according to the invention may be constructed using chemical synthesis and enzymatic ligation reactions using methods known in the art. For example, an antisense nucleic acid sequence (e.g., an antisense oligonucleotide sequence) may be chemically synthesized using naturally occurring nucleotides or variously modified nucleotides designed to increase the biological stability of the molecules or to increase the physical stability of the duplex formed between the antisense and sense nucleic acid sequences, e.g., phosphorothioate derivatives and acridine substituted nucleotides may be used. Examples of modified nucleotides that may be used to generate the antisense nucleic acid sequences are well known in the art. Known nucleotide modifications include methylation, cyclization and ‘caps’ and substitution of one or more of the naturally occurring nucleotides with an analogue such as inosine. Other modifications of nucleotides are well known in the art.

[0096] The antisense nucleic acid sequence can be produced biologically using an expression vector into which a nucleic acid sequence has been subcloned in an antisense orientation (i.e., RNA transcribed from the inserted nucleic acid will be of an antisense orientation to a target nucleic acid of interest). Preferably, production of antisense nucleic acid sequences in plants occurs by means of a stably integrated nucleic acid construct comprising a promoter, an operably linked antisense oligonucleotide, and a terminator.

[0097] The nucleic acid molecules used for silencing in the methods of the invention (whether introduced into a plant or generated in situ) hybridize with or bind to mRNA transcripts and/or genomic DNA encoding a polypeptide to thereby inhibit expression of the protein, e.g., by inhibiting transcription and/or translation. The hybridization can be by conventional nucleotide complementarity to form a stable duplex, or, for example, in the case of an antisense nucleic acid sequence which binds to DNA duplexes, through specific interactions in the major groove of the double helix. Antisense nucleic acid sequences may be introduced into a plant by transformation or direct injection at a specific tissue site. Alternatively, antisense nucleic acid sequences can be modified to target selected cells and then administered systemically. For example, for systemic administration, antisense nucleic acid sequences can be modified such that they specifically bind to receptors or antigens expressed on a selected cell surface, e.g., by linking the antisense nucleic acid sequence to peptides or antibodies which bind to cell surface receptors or antigens. The antisense nucleic acid sequences can also be delivered to cells using the vectors described herein.

[0098] According to a further aspect, the antisense nucleic acid sequence is an a-anomeric nucleic acid sequence. An a-anomeric nucleic acid sequence forms specific double-stranded hybrids with complementary RNA in which, contrary to the usual b-units, the strands run parallel to each other (Gaultier et al. (1987) Nucl Ac Res 15: 6625-6641). The antisense nucleic acid sequence may also comprise a 2′-o-methylribonucleotide (Inoue et al. (1987) Nucl Ac Res 15, 6131-6148) or a chimeric RNA-DNA analogue (Inoue et al. (1987) FEBS Lett. 215, 327-330).

[0099] The reduction or substantial elimination of endogenous gene expression may also be performed using ribozymes. Ribozymes are catalytic RNA molecules with ribonuclease activity that are capable of cleaving a single-stranded nucleic acid sequence, such as an mRNA, to which they have a complementary region. Thus, ribozymes (e.g., hammerhead ribozymes (described in Haselhoff and Gerlach (1988) Nature 334, 585-591) can be used to catalytically cleave mRNA transcripts encoding a polypeptide, thereby substantially reducing the number of mRNA transcripts to be translated into a polypeptide. A ribozyme having specificity for a nucleic acid sequence can be designed (see for example: Cech et al. U.S. Pat. No. 4,987,071; and Cech et al. U.S. Pat. No. 5,116,742). Alternatively, mRNA transcripts corresponding to a nucleic acid sequence can be used to select a catalytic RNA having a specific ribonuclease activity from a pool of RNA molecules (Bartel and Szostak (1993) Science 261, 1411-1418). The use of ribozymes for gene silencing in plants is known in the art (e.g., Atkins et al. (1994) WO 94/00012; Lenne et al. (1995) WO 95/03404; Lutziger et al. (2000) WO 00/00619; Prinsen et al. (1997) WO 97/13865 and Scott et al. (1997) WO 97/38116).

[0100] Gene silencing may also be achieved by insertion mutagenesis (for example, T-DNA insertion or transposon insertion) or by strategies as described by, among others, Angell and Baulcombe ((1999) Plant J 20(3): 357-62), (Amplicon VIGS WO 98/36083), or Baulcombe (WO 99/15682).

[0101] Gene silencing may also occur if there is a mutation on an endogenous gene and/or a mutation on an isolated gene/nucleic acid subsequently introduced into a plant. The reduction or substantial elimination may be caused by a non-functional polypeptide. For example, the polypeptide may bind to various interacting proteins; one or more mutation(s) and/or truncation(s) may therefore provide for a polypeptide that is still able to bind interacting proteins (such as receptor proteins) but that cannot exhibit its normal function (such as signalling ligand).

[0102] A further approach to gene silencing is by targeting nucleic acid sequences complementary to the regulatory region of the gene (e.g., the promoter and/or enhancers) to form triple helical structures that prevent transcription of the gene in target cells. See Helene, C., Anticancer Drug Res. 6, 569-84, 1991; Helene et al., Ann. N.Y. Acad. Sci. 660, 27-36 1992; and Maher, L. J. Bioassays 14, 807-15, 1992.

[0103] Other methods, such as the use of antibodies directed to an endogenous polypeptide for inhibiting its function in planta, or interference in the signalling pathway in which a polypeptide is involved, will be well known to the skilled man. In particular, it can be envisaged that manmade molecules may be useful for inhibiting the biological function of a target polypeptide, or for interfering with the signalling pathway in which the target polypeptide is involved.

[0104] Alternatively, a screening program may be set up to identify in a plant population natural variants of a gene, which variants encode polypeptides with reduced activity. Such natural variants may also be used for example, to perform homologous recombination.

[0105] Artificial and/or natural microRNAs (miRNAs) may be used to knock out gene expression and/or mRNA translation. Endogenous miRNAs are single stranded small RNAs of typically 19-24 nucleotides long. They function primarily to regulate gene expression and/or mRNA translation. Most plant microRNAs (miRNAs) have perfect or near-perfect complementarity with their target sequences. However, there are natural targets with up to five mismatches. They are processed from longer non-coding RNAs with characteristic fold-back structures by double-strand specific RNases of the Dicer family. Upon processing, they are incorporated in the RNA-induced silencing complex (RISC) by binding to its main component, an Argonaute protein. MiRNAs serve as the specificity components of RISC, since they base-pair to target nucleic acids, mostly mRNAs, in the cytoplasm. Subsequent regulatory events include target mRNA cleavage and destruction and/or translational inhibition. Effects of miRNA overexpression are thus often reflected in decreased mRNA levels of target genes.

[0106] Artificial microRNAs (amiRNAs), which are typically 21 nucleotides in length, can be genetically engineered specifically to negatively regulate gene expression of single or multiple genes of interest. Determinants of plant microRNA target selection are well known in the art. Empirical parameters for target recognition have been defined and can be used to aid in the design of specific amiRNAs, (Schwab et al., Dev. Cell 8, 517-527, 2005). Convenient tools for design and generation of amiRNAs and their precursors are also available to the public (Schwab et al., Plant Cell 18, 1121-1133, 2006).

[0107] For optimal performance, the gene silencing techniques used for reducing expression in a plant of an endogenous gene requires the use of nucleic acid sequences from monocotyledonous plants for transformation of monocotyledonous plants, and from dicotyledonous plants for transformation of dicotyledonous plants. Preferably, a nucleic acid sequence from any given plant species is introduced into that same species. For example, a nucleic acid sequence from rice is transformed into a rice plant. However, it is not an absolute requirement that the nucleic acid sequence to be introduced originates from the same plant species as the plant in which it will be introduced. It is sufficient that there is substantial homology between the endogenous target gene and the nucleic acid to be introduced.

[0108] Described above are examples of various methods for the reduction or substantial elimination of expression in a plant of an endogenous gene. A person skilled in the art would readily be able to adapt the aforementioned methods for silencing so as to achieve reduction of expression of an endogenous gene in a whole plant or in parts thereof through the use of an appropriate promoter, for example.

### Transformation

[0109] The term “introduction” or “transformation” as referred to herein encompasses the transfer of an exogenous polynucleotide into a host cell, irrespective of the method used for transfer. Plant tissue capable of subsequent clonal propagation, whether by organogenesis or embryogenesis, may be transformed with a genetic construct of the present invention and a whole plant regenerated there from. The particular tissue chosen will vary depending on the clonal propagation systems available for, and best suited to, the particular species being transformed. Exemplary tissue targets include leaf disks, pollen, embryos, cotyledons, hypocotyls, megagametophytes, callus tissue, existing meristematic tissue (e.g., apical meristem, axillary buds, and root meristems), and induced meristem tissue (e.g., cotyledon meristem and hypocotyl meristem). The polynucleotide may be transiently or stably introduced into a host cell and may be maintained non-integrated, for example, as a plasmid. Alternatively, it may be integrated into the host genome. The resulting transformed plant cell may then be used to regenerate a transformed plant in a manner known to persons skilled in the art.

[0110] The transfer of foreign genes into the genome of a plant is called transformation. Transformation of plant species is now a fairly routine technique. Advantageously, any of several transformation methods may be used to introduce the gene of interest into a suitable ancestor cell. The methods described for the transformation and regeneration of plants from plant tissues or plant cells may be utilized for transient or for stable transformation. Transformation methods include the use of liposomes, electroporation, chemicals that increase free DNA uptake, injection of the DNA directly into the plant, particle gun bombardment, transformation using viruses or pollen and microprojection. Methods may be selected from the calcium/polyethylene glycol method for protoplasts (Krens, F. A. et al., (1982) Nature 296, 72-74; Negrutiu I et al. (1987) Plant Mol Biol 8: 363-373); electroporation of protoplasts (Shillito R. D. et al. (1985) Bio/Technol 3, 1099-1102); microinjection into plant material (Crossway A et al., (1986) Mol. Gen Genet 202: 179-185); DNA or RNA-coated particle bombardment (Klein T M et al., (1987) Nature 327: 70) infection with (non-integrative) viruses and the like. Transgenic plants, including transgenic crop plants, are preferably produced via Agrobacterium-mediated transformation. An advantageous transformation method is the transformation in planta. To this end, it is possible, for example, to allow the agrobacteria to act on plant seeds or to inoculate the plant meristem with agrobacteria. It has proved particularly expedient in accordance with the invention to allow a suspension of transformed agrobacteria to act on the intact plant or at least on the flower primordia. The plant is subsequently grown on until the seeds of the treated plant are obtained (Clough and Bent, Plant J. (1998) 16, 735-743). Methods for Agrobacterium-mediated transformation of rice include well known methods for rice transformation, such as those described in any of the following: European patent application EP 1198985 A1, Aldemita and Hodges (Planta 199: 612-617, 1996); Chan et al. (Plant Mol Biol 22 (3): 491-506, 1993), Hiei et al. (Plant J 6 (2): 271-282, 1994), which disclosures are incorporated by reference herein as if fully set forth. In the case of corn transformation, the preferred method is as described in either Ishida et al. (Nat. Biotechnol 14(6): 745-50, 1996) or Frame et al. (Plant Physiol 129(1): 13-22, 2002), which disclosures are incorporated by reference herein as if fully set forth. Said methods are further described by way of example in B. Jenes et al., Techniques for Gene Transfer, in: Transgenic Plants, Vol. 1, Engineering and Utilization, eds. S.D. Kung and R. Wu, Academic Press (1993) 128-143 and in Potrykus Annu. Rev. Plant Physiol. Plant Molec. Biol. 42 (1991) 205-225). The nucleic acids or the construct to be expressed is preferably cloned into a vector, which is suitable for transforming Agrobacterium tumefaciens, for example pBin19 (Bevan et al., Nucl. Acids Res. 12 (1984) 8711). Agrobacteria transformed by such a vector can then be used in known manner for the transformation of plants, such as plants used as a model, like Arabidopsis (Arabidopsis thaliana is within the scope of the present invention not considered as a crop plant), or crop plants such as, by way of example, tobacco plants, for example by immersing bruised leaves or chopped leaves in an agrobacterial solution and then culturing them in suitable media. The transformation of plants by means of Agrobacterium tumefaciens is described, for example, by Hofgen and Willmitzer in Nucl. Acid Res. (1988) 16, 9877 or is known inter alia from F. F. White, Vectors for Gene Transfer in Higher Plants; in Transgenic Plants, Vol. 1, Engineering and Utilization, eds. S. D. Kung and R. Wu, Academic Press, 1993, pp. 15-38.

[0111] In addition to the transformation of somatic cells, which then have to be regenerated into intact plants, it is also possible to transform the cells of plant meristems and in particular those cells which develop into gametes. In this case, the transformed gametes follow the natural plant development, giving rise to transgenic plants. Thus, for example, seeds of Arabidopsis are treated with agrobacteria and seeds are obtained from the developing plants of which a certain proportion is transformed and thus transgenic [Feldman, K A and Marks M D (1987). Mol Gen Genet 208:274-289; Feldmann K (1992). In: C Koncz, N-H Chua and J Shell, eds, Methods in Arabidopsis Research. Word Scientific, Singapore, pp. 274-289]. Alternative methods are based on the repeated removal of the inflorescences and incubation of the excision site in the center of the rosette with transformed agrobacteria, whereby transformed seeds can likewise be obtained at a later point in time (Chang (1994). Plant J. 5: 551-558; Katavic (1994). Mol Gen Genet, 245: 363-370). However, an especially effective method is the vacuum infiltration method with its modifications such as the “floral dip” method. In the case of vacuum infiltration of Arabidopsis, intact plants under reduced pressure are treated with an agrobacterial suspension [Bechthold, N (1993). C R Acad Sci Paris Life Sci, 316: 1194-1199], while in the case of the “floral dip” method the developing floral tissue is incubated briefly with a surfactant-treated agrobacterial suspension [Clough, S J and Bent A F (1998) The Plant J. 16, 735-743]. A certain proportion of transgenic seeds are harvested in both cases, and these seeds can be distinguished from non-transgenic seeds by growing under the above-described selective conditions. In addition the stable transformation of plastids is of advantages because plastids are inherited maternally is most crops reducing or eliminating the risk of transgene flow through pollen. The transformation of the chloroplast genome is generally achieved by a process which has been schematically displayed in Klaus et al., 2004 [Nature Biotechnology 22 (2), 225-229]. Briefly the sequences to be transformed are cloned together with a selectable marker gene between flanking sequences homologous to the chloroplast genome. These homologous flanking sequences direct site specific integration into the plastome. Plastidal transformation has been described for many different plant species and an overview is given in Bock (2001) Transgenic plastids in basic research and plant biotechnology. J Mol Biol. 2001 Sep. 21; 312 (3):425-38 or Maliga, P (2003) Progress towards commercialization of plastid transformation technology. Trends Biotechnol. 21, 20-28. Further biotechnological progress has recently been reported in form of marker free plastid transformants, which can be produced by a transient co-integrated maker gene (Klaus et al., 2004, Nature Biotechnology 22(2), 225-229).

[0112] The genetically modified plant cells can be regenerated via all methods with which the skilled worker is familiar. Suitable methods can be found in the above-mentioned publications by S. D. Kung and R. Wu, Potrykus or Hofgen and Willmitzer.

[0113] Generally after transformation, plant cells or cell groupings are selected for the presence of one or more markers which are encoded by plant-expressible genes co-transferred with the gene of interest, following which the transformed material is regenerated into a whole plant. To select transformed plants, the plant material obtained in the transformation is, as a rule, subjected to selective conditions so that transformed plants can be distinguished from untransformed plants. For example, the seeds obtained in the above-described manner can be planted and, after an initial growing period, subjected to a suitable selection by spraying. A further possibility consists in growing the seeds, if appropriate after sterilization, on agar plates using a suitable selection agent so that only the transformed seeds can grow into plants. Alternatively, the transformed plants are screened for the presence of a selectable marker such as the ones described above.

[0114] Following DNA transfer and regeneration, putatively transformed plants may also be evaluated, for instance using Southern analysis, for the presence of the gene of interest, copy number and/or genomic organisation. Alternatively or additionally, expression levels of the newly introduced DNA may be monitored using Northern and/or Western analysis, both techniques being well known to persons having ordinary skill in the art.

[0115] The generated transformed plants may be propagated by a variety of means, such as by clonal propagation or classical breeding techniques. For example, a first generation (or T1) transformed plant may be selfed and homozygous second-generation (or T2) transformants selected, and the T2 plants may then further be propagated through classical breeding techniques. The generated transformed organisms may take a variety of forms. For example, they may be chimeras of transformed cells and non-transformed cells; clonal transformants (e.g., all cells transformed to contain the expression cassette); grafts of transformed and untransformed tissues (e.g., in plants, a transformed rootstock grafted to an untransformed scion).

### T-DNA Activation Tagging

[0116] T-DNA activation tagging (Hayashi et al. Science (1992) 1350-1353), involves insertion of T-DNA, usually containing a promoter (may also be a translation enhancer or an intron), in the genomic region of the gene of interest or 10 kb up- or downstream of the coding region of a gene in a configuration such that the promoter directs expression of the targeted gene. Typically, regulation of expression of the targeted gene by its natural promoter is disrupted and the gene falls under the control of the newly introduced promoter. The promoter is typically embedded in a T-DNA. This T-DNA is randomly inserted into the plant genome, for example, through Agrobacterium infection and leads to modified expression of genes near the inserted T-DNA. The resulting transgenic plants show dominant phenotypes due to modified expression of genes close to the introduced promoter.

### TILLING

[0117] The term “TILLING” is an abbreviation of “Targeted Induced Local Lesions In Genomes” and refers to a mutagenesis technology useful to generate and/or identify nucleic acids encoding proteins with modified expression and/or activity. TILLING also allows selection of plants carrying such mutant variants. These mutant variants may exhibit modified expression, either in strength or in location or in timing (if the mutations affect the promoter for example). These mutant variants may exhibit higher activity than that exhibited by the gene in its natural form. TILLING combines high-density mutagenesis with high-throughput screening methods. The steps typically followed in TILLING are: (a) EMS mutagenesis (Redei G P and Koncz C (1992) In Methods in Arabidopsis Research, Koncz C, Chua N H, Schell J, eds. Singapore, World Scientific Publishing Co, pp. 16-82; Feldmann et al., (1994) In Meyerowitz E M, Somerville C R, eds, Arabidopsis. Cold Spring Harbor Laboratory Press, Cold Spring Harbor, N.Y., pp 137-172; Lightner J and Caspar T (1998) In J Martinez-Zapater, J Salinas, eds, Methods on Molecular Biology, Vol. 82. Humana Press, Totowa, N.J., pp 91-104); (b) DNA preparation and pooling of individuals; (c) PCR amplification of a region of interest; (d) denaturation and annealing to allow formation of heteroduplexes; (e) DHPLC, where the presence of a heteroduplex in a pool is detected as an extra peak in the chromatogram; (f) identification of the mutant individual; and (g) sequencing of the mutant PCR product. Methods for TILLING are well known in the art (McCallum et al., (2000) Nat Biotechnol 18: 455-457; reviewed by Stemple (2004) Nat Rev Genet 5(2): 145-50).

### Homologous Recombination

[0118] Homologous recombination allows introduction in a genome of a selected nucleic acid at a defined selected position. Homologous recombination is a standard technology used routinely in biological sciences for lower organisms such as yeast or the moss Physcomitrella. Methods for performing homologous recombination in plants have been described not only for model plants (Offring a et al. (1990) EMBO J 9(10): 3077-84) but also for crop plants, for example rice (Terada et al. (2002) Nat Biotech 20(10): 1030-4; Iida and Terada (2004) Curr Opin Biotech 15(2): 132-8), and approaches exist that are generally applicable regardless of the target organism (Miller et al, Nature Biotechnol. 25, 778-785, 2007).

### Yield Related Traits

[0119] Yield related traits comprise one or more of yield, biomass, seed yield, early vigour, greenness index, increased growth rate, improved agronomic traits (such as improved Water Use Efficiency (WUE), Nitrogen Use Efficiency (NUE), etc.).

### Yield

[0120] The term “yield” in general means a measurable produce of economic value, typically related to a specified crop, to an area, and to a period of time. Individual plant parts directly contribute to yield based on their number, size and/or weight, or the actual yield is the yield per square meter for a crop and year, which is determined by dividing total production (includes both harvested and appraised production) by planted square meters. The term “yield” of a plant may relate to vegetative biomass (root and/or shoot biomass), to reproductive organs, and/or to propagules (such as seeds) of that plant.

[0121] Taking corn as an example, a yield increase may be manifested as one or more of the following: increase in the number of plants established per square meter, an increase in the number of ears per plant, an increase in the number of rows, number of kernels per row, kernel weight, thousand kernel weight, ear length/diameter, increase in the seed filling rate (which is the number of filled seeds divided by the total number of seeds and multiplied by 100), among others. Taking rice as an example, a yield increase may manifest itself as an increase in one or more of the following: number of plants per square meter, number of panicles per plant, panicle length, number of spikelets per panicle, number of flowers (florets) per panicle, increase in the seed filling rate (which is the number of filled seeds divided by the total number of seeds and multiplied by 100), increase in thousand kernel weight, among others. In rice, submergence tolerance may also result in increased yield.

### Early Vigour

[0122] “Early vigour” refers to active healthy well-balanced growth especially during early stages of plant growth, and may result from increased plant fitness due to, for example, the plants being better adapted to their environment (i.e. optimizing the use of energy resources and partitioning between shoot and root). Plants having early vigour also show increased seedling survival and a better establishment of the crop, which often results in highly uniform fields (with the crop growing in uniform manner, i.e. with the majority of plants reaching the various stages of development at substantially the same time), and often better and higher yield. Therefore, early vigour may be determined by measuring various factors, such as thousand kernel weight, percentage germination, percentage emergence, seedling growth, seedling height, root length, root and shoot biomass and many more.

### Increased Growth Rate

[0123] The increased growth rate may be specific to one or more parts of a plant (including seeds), or may be throughout substantially the whole plant. Plants having an increased growth rate may have a shorter life cycle. The life cycle of a plant may be taken to mean the time needed to grow from a dry mature seed up to the stage where the plant has produced dry mature seeds, similar to the starting material. This life cycle may be influenced by factors such as speed of germination, early vigour, growth rate, greenness index, flowering time and speed of seed maturation. The increase in growth rate may take place at one or more stages in the life cycle of a plant or during substantially the whole plant life cycle. Increased growth rate during the early stages in the life cycle of a plant may reflect enhanced vigour. The increase in growth rate may alter the harvest cycle of a plant allowing plants to be sown later and/or harvested sooner than would otherwise be possible (a similar effect may be obtained with earlier flowering time). If the growth rate is sufficiently increased, it may allow for the further sowing of seeds of the same plant species (for example sowing and harvesting of rice plants followed by sowing and harvesting of further rice plants all within one conventional growing period). Similarly, if the growth rate is sufficiently increased, it may allow for the further sowing of seeds of different plants species (for example the sowing and harvesting of corn plants followed by, for example, the sowing and optional harvesting of soybean, potato or any other suitable plant). Harvesting additional times from the same rootstock in the case of some crop plants may also be possible. Altering the harvest cycle of a plant may lead to an increase in annual biomass production per square meter (due to an increase in the number of times (say in a year) that any particular plant may be grown and harvested). An increase in growth rate may also allow for the cultivation of transgenic plants in a wider geographical area than their wild-type counterparts, since the territorial limitations for growing a crop are often determined by adverse environmental conditions either at the time of planting (early season) or at the time of harvesting (late season). Such adverse conditions may be avoided if the harvest cycle is shortened. The growth rate may be determined by deriving various parameters from growth curves, such parameters may be: T-Mid (the time taken for plants to reach 50% of their maximal size) and T-90 (time taken for plants to reach 90% of their maximal size), amongst others.

### Stress Resistance

[0124] An increase in yield and/or growth rate occurs whether the plant is under non-stress conditions or whether the plant is exposed to various stresses compared to control plants. Plants typically respond to exposure to stress by growing more slowly. In conditions of severe stress, the plant may even stop growing altogether. Mild stress on the other hand is defined herein as being any stress to which a plant is exposed which does not result in the plant ceasing to grow altogether without the capacity to resume growth. Mild stress in the sense of the invention leads to a reduction in the growth of the stressed plants of less than 40%, 35%, 30% or 25%, more preferably less than 20% or 15% in comparison to the control plant under non-stress conditions. Due to advances in agricultural practices (irrigation, fertilization, pesticide treatments) severe stresses are not often encountered in cultivated crop plants. As a consequence, the compromised growth induced by mild stress is often an undesirable feature for agriculture. Mild stresses are the everyday biotic and/or abiotic (environmental) stresses to which a plant is exposed. Abiotic stresses may be due to drought or excess water, anaerobic stress, salt stress, chemical toxicity, oxidative stress and hot, cold or freezing temperatures. The abiotic stress may be an osmotic stress caused by a water stress (particularly due to drought), salt stress, oxidative stress or an ionic stress. Biotic stresses are typically those stresses caused by pathogens, such as bacteria, viruses, fungi, nematodes and insects.

[0125] In particular, the methods of the present invention may be performed under non-stress conditions or under conditions of mild drought to give plants having increased yield relative to control plants. As reported in Wang et al. (Planta (2003) 218: 1-14), abiotic stress leads to a series of morphological, physiological, biochemical and molecular changes that adversely affect plant growth and productivity. Drought, salinity, extreme temperatures and oxidative stress are known to be interconnected and may induce growth and cellular damage through similar mechanisms. Rabbani et al. (Plant Physiol (2003) 133: 1755-1767) describes a particularly high degree of “cross talk” between drought stress and high-salinity stress. For example, drought and/or salinisation are manifested primarily as osmotic stress, resulting in the disruption of homeostasis and ion distribution in the cell. Oxidative stress, which frequently accompanies high or low temperature, salinity or drought stress, may cause denaturing of functional and structural proteins. As a consequence, these diverse environmental stresses often activate similar cell signalling pathways and cellular responses, such as the production of stress proteins, up-regulation of anti-oxidants, accumulation of compatible solutes and growth arrest. The term “non-stress” conditions as used herein are those environmental conditions that allow optimal growth of plants. Persons skilled in the art are aware of normal soil conditions and climatic conditions for a given location. Plants with optimal growth conditions, (grown under non-stress conditions) typically yield in increasing order of preference at least 97%, 95%, 92%, 90%, 87%, 85%, 83%, 80%, 77% or 75% of the average production of such plant in a given environment. Average production may be calculated on harvest and/or season basis. Persons skilled in the art are aware of average yield productions of a crop.

[0126] Nutrient deficiency may result from a lack of nutrients such as nitrogen, phosphates and other phosphorous-containing compounds, potassium, calcium, magnesium, manganese, iron and boron, amongst others.

[0127] The term salt stress is not restricted to common salt (NaCl), but may be any one or more of: NaCI, KCI, LiCI, MgCl₂, CaCl₂, amongst others.

### Increase/Improve/Enhance

[0128] The terms “increase”, “improve” or “enhance” are interchangeable and shall mean in the sense of the application at least a 3%, 4%, 5%, 6%, 7%, 8%, 9% or 10%, preferably at least 15% or 20%, more preferably 25%, 30%, 35% or 40% more yield and/or growth in comparison to control plants as defined herein.

### Seed Yield

[0129] Increased seed yield may manifest itself as one or more of the following: a) an increase in seed biomass (total seed weight) which may be on an individual seed basis and/or per plant and/or per square meter; b) increased number of flowers per plant; c) increased number of (filled) seeds; d) increased seed filling rate (which is expressed as the ratio between the number of filled seeds divided by the total number of seeds); e) increased harvest index, which is expressed as a ratio of the yield of harvestable parts, such as seeds, divided by the total biomass; and f) increased thousand kernel weight (TKW), which is extrapolated from the number of filled seeds counted and their total weight. An increased TKW may result from an increased seed size and/or seed weight, and may also result from an increase in embryo and/or endosperm size.

[0130] An increase in seed yield may also be manifested as an increase in seed size and/or seed volume. Furthermore, an increase in seed yield may also manifest itself as an increase in seed area and/or seed length and/or seed width and/or seed perimeter. Increased yield may also result in modified architecture, or may occur because of modified architecture.

### Greenness Index

[0131] The “greenness index” as used herein is calculated from digital images of plants. For each pixel belonging to the plant object on the image, the ratio of the green value versus the red value (in the RGB model for encoding color) is calculated. The greenness index is expressed as the percentage of pixels for which the green-to-red ratio exceeds a given threshold. Under normal growth conditions, under salt stress growth conditions, and under reduced nutrient availability growth conditions, the greenness index of plants is measured in the last imaging before flowering. In contrast, under drought stress growth conditions, the greenness index of plants is measured in the first imaging after drought.

### Marker Assisted Breeding

[0132] Such breeding programmes sometimes require introduction of allelic variation by mutagenic treatment of the plants, using for example EMS mutagenesis; alternatively, the programme may start with a collection of allelic variants of so called “natural” origin caused unintentionally. Identification of allelic variants then takes place, for example, by PCR. This is followed by a step for selection of superior allelic variants of the sequence in question and which give increased yield. Selection is typically carried out by monitoring growth performance of plants containing different allelic variants of the sequence in question. Growth performance may be monitored in a greenhouse or in the field. Further optional steps include crossing plants in which the superior allelic variant was identified with another plant. This could be used, for example, to make a combination of interesting phenotypic features.

### Use as Probes in (Gene Mapping)

[0133] Use of nucleic acids encoding the protein of interest for genetically and physically mapping the genes requires only a nucleic acid sequence of at least 15 nucleotides in length. These nucleic acids may be used as restriction fragment length polymorphism (RFLP) markers. Southern blots (Sambrook J, Fritsch E F and Maniatis T (1989) Molecular Cloning, A Laboratory Manual) of restriction-digested plant genomic DNA may be probed with the nucleic acids encoding the protein of interest. The resulting banding patterns may then be subjected to genetic analyses using computer programs such as MapMaker (Lander et al. (1987) Genomics 1: 174-181) in order to construct a genetic map. In addition, the nucleic acids may be used to probe Southern blots containing restriction endonuclease-treated genomic DNAs of a set of individuals representing parent and progeny of a defined genetic cross. Segregation of the DNA polymorphisms is noted and used to calculate the position of the nucleic acid encoding the protein of interest in the genetic map previously obtained using this population (Botstein et al. (1980) Am. J. Hum. Genet. 32:314-331).

[0134] The production and use of plant gene-derived probes for use in genetic mapping is described in Bernatzky and Tanksley (1986) Plant Mol. Biol. Reporter 4: 37-41. Numerous publications describe genetic mapping of specific cDNA clones using the methodology outlined above or variations thereof. For example, F2 intercross populations, backcross populations, randomly mated populations, near isogenic lines, and other sets of individuals may be used for mapping. Such methodologies are well known to those skilled in the art.

[0135] The nucleic acid probes may also be used for physical mapping (i.e., placement of sequences on physical maps; see Hoheisel et al. In: Non-mammalian Genomic Analysis: A Practical Guide, Academic press 1996, pp. 319-346, and references cited therein).

[0136] In another embodiment, the nucleic acid probes may be used in direct fluorescence in situ hybridisation (FISH) mapping (Trask (1991) Trends Genet. 7:149-154). Although current methods of FISH mapping favour use of large clones (several kb to several hundred kb; see Laan et al. (1995) Genome Res. 5:13-20), improvements in sensitivity may allow performance of FISH mapping using shorter probes.

[0137] A variety of nucleic acid amplification-based methods for genetic and physical mapping may be carried out using the nucleic acids. Examples include allele-specific amplification (Kazazian (1989) J. Lab. Clin. Med 11:95-96), polymorphism of PCR-amplified fragments (CAPS; Sheffield et al. (1993) Genomics 16:325-332), allele-specific ligation (Landegren et al. (1988) Science 241:1077-1080), nucleotide extension reactions (Sokolov (1990) Nucleic Acid Res. 18:3671), Radiation Hybrid Mapping (Walter et al. (1997) Nat. Genet. 7:22-28) and Happy Mapping (Dear and Cook (1989) Nucleic Acid Res. 17:6795-6807). For these methods, the sequence of a nucleic acid is used to design and produce primer pairs for use in the amplification reaction or in primer extension reactions. The design of such primers is well known to those skilled in the art. In methods employing PCR-based genetic mapping, it may be necessary to identify DNA sequence differences between the parents of the mapping cross in the region corresponding to the instant nucleic acid sequence. This, however, is generally not necessary for mapping methods.

### Plant

[0138] The term “plant” as used herein encompasses whole plants, ancestors and progeny of the plants and plant parts, including seeds, shoots, stems, leaves, roots (including tubers), flowers, and tissues and organs, wherein each of the aforementioned comprise the gene/nucleic acid of interest. The term “plant” also encompasses plant cells, suspension cultures, callus tissue, embryos, meristematic regions, gametophytes, sporophytes, pollen and microspores, again wherein each of the aforementioned comprises the gene/nucleic acid of interest.

[0139] Plants that are particularly useful in the methods of the invention include all plants which belong to the superfamily Viridiplantae, in particular monocotyledonous and dicotyledonous plants including fodder or forage legumes, ornamental plants, food crops, trees or shrubs selected from the list comprising Acer spp., Actinidia spp., Abelmoschus spp., Agave sisalana, Agropyron spp., Agrostis stolonifera, Allium spp., Amaranthus spp., Ammophila arenaria, Ananas comosus, Annona spp., Apium graveolens, Arachis spp, Artocarpus spp., Asparagus officinalis, Avena spp. (e.g. Avena sativa, Avena fatua, Avena byzantina, Avena fatua var. sativa, Avena hybrida), Averrhoa carambola, Bambusa sp., Benincasa hispida, Bertholletia excelsea, Beta vulgaris, Brassica spp. (e.g. Brassica napus, Brassica rapa ssp. [canola, oilseed rape, turnip rape]), Cadaba farinosa, Camellia sinensis, Canna indica, Cannabis sativa, Capsicum spp., Carex elata, Carica papaya, Carissa macrocarpa, Carya spp., Carthamus tinctorius, Castanea spp., Ceiba pentandra, Cichorium endivia, Cinnamomum spp., Citrullus lanatus, Citrus spp., Cocos spp., Coffea spp., Colocasia esculenta, Cola spp., Corchorus sp., Coriandrum sativum, Corylus spp., Crataegus spp., Crocus sativus, Cucurbita spp., Cucumis spp., Cynara spp., Daucus carota, Desmodium spp., Dimocarpus longan, Dioscorea spp., Diospyros spp., Echinochloa spp., Elaeis (e.g. Elaeis guineensis, Elaeis oleifera), Eleusine coracana, Eragrostis tef, Erianthus sp., Eriobotrya japonica, Eucalyptus sp., Eugenia uniflora, Fagopyrum spp., Fagus spp., Festuca arundinacea, Ficus carica, Fortunella spp., Fragaria spp., Ginkgo biloba, Glycine spp. (e.g. Glycine max, Soja hispida or Soja max), Gossypium hirsutum, Helianthus spp. (e.g. Helianthus annuus), Hemerocallis fulva, Hibiscus spp., Hordeum spp. (e.g. Hordeum vulgare), Ipomoea batatas, Juglans spp., Lactuca sativa, Lathyrus spp., Lens culinaris, Linum usitatissimum, Litchi chinensis, Lotus spp., Luffa acutangula, Lupinus spp., Luzula sylvatica, Lycopersicon spp. (e.g. Lycopersicon esculentum, Lycopersicon lycopersicum, Lycopersicon pyriforme), Macrotyloma spp., Malus spp., Malpighia emarginata, Mammea americana, Mangifera indica, Manihot spp., Manilkara zapota, Medicago sativa, Melilotus spp., Mentha spp., Miscanthus sinensis, Momordica spp., Morus nigra, Musa spp., Nicotiana spp., Olea spp., Opuntia spp., Ornithopus spp., Oryza spp. (e.g. Oryza sativa, Oryza latifolia), Panicum miliaceum, Panicum virgatum, Passiflora edulis, Pastinaca sativa, Pennisetum sp., Persea spp., Petroselinum crispum, Phalaris arundinacea, Phaseolus spp., Phleum pratense, Phoenix spp., Phragmites australis, Physalis spp., Pinus spp., Pistacia vera, Pisum spp., Poa spp., Populus spp., Prosopis spp., Prunus spp., Psidium spp., Punica granatum, Pyrus communis, Quercus spp., Raphanus sativus, Rheum rhabarbarum, Ribes spp., Ricinus communis, Rubus spp., Saccharum spp., Salix sp., Sambucus spp., Secale cereale, Sesamum spp., Sinapis sp., Solanum spp. (e.g. Solanum tuberosum, Solanum integrifolium or Solanum lycopersicum), Sorghum bicolor, Spinacia spp., Syzygium spp., Tagetes spp., Tamarindus indica, Theobroma cacao, Trifolium spp., Tripsacum dactyloides, Triticosecale rimpaui, Triticum spp. (e.g. Triticum aestivum, Triticum durum, Triticum turgidum, Triticum hybernum, Triticum macha, Triticum sativum, Triticum monococcum or Triticum vulgare), Tropaeolum minus, Tropaeolum majus, Vaccinium spp., Vicia spp., Vigna spp., Viola odorata, Vitis spp., Zea mays, Zizania palustris, Ziziphus spp., amongst others.

### Control Plant(s)

[0140] The choice of suitable control plants is a routine part of an experimental setup and may include corresponding wild type plants or corresponding plants without the gene of interest. The control plant is typically of the same plant species or even of the same variety as the plant to be assessed. The control plant may also be a nullizygote of the plant to be assessed. Nullizygotes are individuals missing the transgene by segregation. A “control plant” as used herein refers not only to whole plants, but also to plant parts, including seeds and seed parts.

### DETAILED DESCRIPTION OF THE INVENTION

[0141] Surprisingly, it has now been found that modulating expression in a plant of a nucleic acid encoding an IAA2-like polypeptide gives plants having enhanced yield-related traits relative to control plants. According to a first embodiment, the present invention provides a method for enhancing yield-related traits in plants relative to control plants, comprising modulating expression in a plant of a nucleic acid encoding an IAA2-like polypeptide and wherein the yield related traits do not encompass increased root growth.

[0142] Furthermore, it has now been surprisingly found that modulating expression in a plant of a nucleic acid encoding a NAC10-like polypeptide gives plants having enhanced yield-related traits relative to control plants. According to a first embodiment, the present invention provides a method for enhancing yield-related traits in plants relative to control plants, comprising modulating expression in a plant of a nucleic acid encoding a NAC10-like polypeptide and optionally selecting for plants having enhanced yield-related traits.

[0143] A preferred method for modulating (preferably, increasing) expression of a nucleic acid encoding an IAA2-like polypeptide or a NAC10-like polypeptide is by introducing and expressing in a plant a nucleic acid encoding an IAA2-like polypeptide or a NAC10-like polypeptide.

[0144] Concerning a IAA2-like polypeptides, any reference hereinafter to a “protein (or polypeptide) useful in the methods of the invention” is taken to mean an IAA2-like polypeptide as defined herein. Any reference hereinafter to a “nucleic acid useful in the methods of the invention” is taken to mean a nucleic acid capable of encoding such an IAA2-like polypeptide. The nucleic acid to be introduced into a plant (and therefore useful in performing the methods of the invention) is any nucleic acid encoding the type of protein which will now be described, hereafter also named “IAA2-like nucleic acid” or “IAA2-like gene”.

[0145] Concerning a NAC10-like polypeptides, any reference hereinafter to a “protein useful in the methods of the invention” is taken to mean a NAC10-like polypeptide as defined herein. Any reference hereinafter to a “nucleic acid useful in the methods of the invention” is taken to mean a nucleic acid capable of encoding such a NAC10-like polypeptide. The nucleic acid to be introduced into a plant (and therefore useful in performing the methods of the invention) is any nucleic acid encoding the type of protein which will now be described, hereafter also named “NAC10-like nucleic acid” or “NAC10-like gene”.

[0146] An “IAA2-like polypeptide” as defined herein refers to any polypeptide comprising an AUX/IAA domain (PFAM accession number PF2309, InterPro entry IPR003311) and the protein motif: Motif 1, SEQ ID NO: 22: (K/N)(I/M/L)F(S/Y)(Q/G)L.

[0147] A preferred “IAA2-like polypeptide” of the invention further comprises one of more of the following motifs:

Motif 2, SEQ ID NO: 23:
(Q/G)LLDG(S/T)G(E/V)YTL
Motif 3, SEQ ID NO: 24:
LLDGSGEYTLVY
Motif 4, SEQ ID NO: 25:
KKLELRLGPPG

wherein amino acids indicated between brackets at a position represent alternative amino acids at that position.

[0148] The AUX/IAA domain spans amino acids 49 to 335 in SEQ ID NO: 2. A consensus sequence comprising the most highly conserved amino acids in IAA2-like polypeptide may be represented by SEQ ID NO: 21.

[0149] In addition, on another preferred embodiment the IAA2-like polypeptide of the invention has in increasing order of preference at least 80%, 81%, 82%, 83%, 84%, 85%, 86%, 87%, 88%, 89%, 90%, 91%, 92%, 93%, 94%, 95%, 96%, 97%, 98%, or 99% overall sequence identity to the amino acid sequence of the AUX/IAA domain of any of the polypeptides of Table A1, preferably the amino acid sequence of the AUX/IAA domain of SEQ ID NO: 2, even more preferably to the sequence of the consensus AUX/IAA domain in IAA2-like polypeptides as represented by SEQ ID NO: 21.

[0150] Alternatively, the homologue of an IAA2-like protein has in increasing order of preference at least 80%, 81%, 82%, 83%, 84%, 85%, 86%, 87%, 88%, 89%, 90%, 91%, 92%, 93%, 94%, 95%, 96%, 97%, 98%, or 99% overall sequence identity to the amino acid represented by any of the polypeptide sequences of Table A1, preferably by SEQ ID NO: 2, provided that the homologous protein comprises an AUX/IAA domain and one or more of the conserved motifs as outlined above. The overall sequence identity is determined using a global alignment algorithm, such as the Needleman Wunsch algorithm in the program GAP (GCG Wisconsin Package, Accelrys), preferably with default parameters and preferably with sequences of mature proteins (i.e. without taking into account secretion signals or transit peptides). Compared to overall sequence identity, the sequence identity will generally be higher when only conserved domains or motifs are considered.

[0151] A “NAC10-like polypeptide” as defined herein refers to any polypeptide comprising a NAM domain (Pfam accession PF02365, also known as NAC domain, Prosite accession PS51005).

[0152] Additionally or alternatively, a “NAC10-like polypeptide” as defined herein is one comprising any one or more of the Motifs described below.

[0153] Motif I: A/P/S/N/V/T T/V/L/I/A/S T/P/S/D/V/Q D/V/I/F I A/T/G/P (SEQ ID NO: 379), or a motif having in increasing order of preference 3, 2 or 1 conservative amino acid substitution compared to the sequence of Motif I.

[0154] Motif I is preferably P/T V/A/S/L S/P I/F I A/P, most preferably Motif I is PVPIIA.

[0155] Motif II: R/N/K E/G/S I/R/S/Q/A/V/L R/Q NP N/S/R (SEQ ID NO: 380), or a motif having in increasing order of preference 3, 2 or 1 conservative amino acid substitution compared to the sequence of Motif II.

[0156] Motif II is preferably N/K G A/V/I/L RPN, most preferably Motif II is NGARPN.

[0157] Motif III: CN R/K L/I/V S/Y/H/F/R N/K/Q K D/K/N/C/S/T/G/M/A/R (SEQ ID NO: 381), or a motif having in increasing order of preference 3, 2 or 1 conservative amino acid substitution compared to the sequence of Motif III.

[0158] Motif III is preferably C R V/I H/Y/R N/K/Q K G/M/A/S/R/K, most preferably Motif III is CRIHKKS

[0159] More preferably, the NAC10-like polypeptide comprises in increasing order of preference, at least 2, or all 3 motifs.

[0160] Alternatively or additionally, the homologue of a NAC10-like protein has in increasing order of preference at least 25%, 26%, 27%, 28%, 29%, 30%, 31%, 32%, 33%, 34%, 35%, 36%, 37%, 38%, 39%, 40%, 41%, 42%, 43%, 44%, 45%, 46%, 47%, 48%, 49%, 50%, 51%, 52%, 53%, 54%, 55%, 56%, 57%, 58%, 59%, 60%, 61%, 62%, 63%, 64%, 65%, 66%, 67%, 68%, 69%, 70%, 71%, 72%, 73%, 74%, 75%, 76%, 77%, 78%, 79%, 80%, 81%, 82%, 83%, 84%, 85%, 86%, 87%, 88%, 89%, 90%, 91%, 92%, 93%, 94%, 95%, 96%, 97%, 98%, or 99% overall sequence identity to the amino acid represented by SEQ ID NO: 28, provided that the homologous protein comprises the conserved motifs as outlined above. The overall sequence identity is determined using a global alignment algorithm, such as the Needleman Wunsch algorithm in the program GAP (GCG Wisconsin Package, Accelrys), preferably with default parameters and preferably with sequences of mature proteins (i.e. without taking into account secretion signals or transit peptides). Compared to overall sequence identity, the sequence identity will generally be higher when only conserved domains or motifs are considered. Preferably the motifs in a NAC10-like polypeptide have, in increasing order of preference, at least 70%, 71%, 72%, 73%, 74%, 75%, 76%, 77%, 78%, 79%, 80%, 81%, 82%, 83%, 84%, 85%, 86%, 87%, 88%, 89%, 90%, 91%, 92%, 93%, 94%, 95%, 96%, 97%, 98%, or 99% sequence identity to the motifs represented by SEQ ID NO: 379 to SEQ ID NO: 381 (Motifs I to III).

[0161] Preferably, the polypeptide sequence which when used in the construction of a phylogenetic tree, such as the one depicted in FIG. 5, clusters with the group of NAC10-like polypeptides comprising the amino acid sequence represented by SEQ ID NO: 28 (Subgroup I) rather than with any other group.

[0162] The terms “domain”, “signature” and “motif” are defined in the “definitions” section herein. Specialist databases exist for the identification of domains, for example, SMART (Schultz et al. (1998) Proc. Natl. Acad. Sci. USA 95, 5857-5864; Letunic et al. (2002) Nucleic Acids Res 30, 242-244), InterPro (Mulder et al., (2003) Nucl. Acids. Res. 31, 315-318), Prosite (Bucher and Bairoch (1994), A generalized profile syntax for biomolecular sequences motifs and its function in automatic sequence interpretation. (In) ISMB-94; Proceedings 2nd International Conference on Intelligent Systems for Molecular Biology. Altman R., Brutlag D., Karp P., Lathrop R., Searls D., Eds., pp 53-61, AAAI Press, Menlo Park; Hulo et al., Nucl. Acids. Res. 32:D134-D137, (2004)), or Pfam (Bateman et al., Nucleic Acids Research 30(1): 276-280 (2002)). A set of tools for in silico analysis of protein sequences is available on the ExPASy proteomics server (Swiss Institute of Bioinformatics; Gasteiger et al., Nucleic Acids Res. 31:3784-3788 (2003)). Domains or motifs may also be identified using routine techniques, such as by sequence alignment.

[0163] Concerning NAC10-like polypeptides, an alignment of the polypeptides of Table A2 herein is shown in FIG. 5 and FIG. 12. Such alignments are useful for identifying the most conserved domains or motifs between the NAC10-like polypeptides as defined herein. One such domain is NAM domain (Pfam accession PF02365), indicated in bold in FIG. 4, whereas motifs I to III are underlined.

[0164] Methods for the alignment of sequences for comparison are well known in the art, such methods include GAP, BESTFIT, BLAST, FASTA and TFASTA. GAP uses the algorithm of Needleman and Wunsch ((1970) J Mol Biol 48: 443-453) to find the global (i.e. spanning the complete sequences) alignment of two sequences that maximizes the number of matches and minimizes the number of gaps. The BLAST algorithm (Altschul et al. (1990) J Mol Biol 215: 403-10) calculates percent sequence identity and performs a statistical analysis of the similarity between the two sequences. The software for performing BLAST analysis is publicly available through the National Centre for Biotechnology Information (NCBI). Homologues may readily be identified using, for example, the ClustalW multiple sequence alignment algorithm (version 1.83), with the default pairwise alignment parameters, and a scoring method in percentage. Global percentages of similarity and identity may also be determined using one of the methods available in the MatGAT software package (Campanella et al., BMC Bioinformatics. 2003 Jul. 10; 4:29. MatGAT: an application that generates similarity/identity matrices using protein or DNA sequences.). Minor manual editing may be performed to optimise alignment between conserved motifs, as would be apparent to a person skilled in the art. Furthermore, instead of using full-length sequences for the identification of homologues, specific domains may also be used. The sequence identity values may be determined over the entire nucleic acid or amino acid sequence or over selected domains or conserved motif(s), using the programs mentioned above using the default parameters. For local alignments, the Smith-Waterman algorithm is particularly useful (Smith T F, Waterman M S (1981) J. Mol. Biol 147(1); 195-7).

[0165] Concerning NAC10-like polypeptides, Example 3 describes in Table B1 the percentage identity between various NAC10-like polypeptides, in particular the percentage identity between SEQ ID NO: 28 and other NAC10-like polypeptides, which can be as low as 30%.

[0166] The task of protein subcellular localisation prediction is important and well studied. Knowing a protein's localisation helps elucidate its function. Experimental methods for protein localization range from immunolocalization to tagging of proteins using green fluorescent protein (GFP) or beta-glucuronidase (GUS). Such methods are accurate although labor-intensive compared with computational methods. Recently much progress has been made in computational prediction of protein localisation from sequence data. Among algorithms well known to a person skilled in the art are available at the ExPASy Proteomics tools hosted by the Swiss Institute for Bioinformatics, for example, PSort, TargetP, ChloroP, LocTree, Predotar, LipoP, MITOPROT, PATS, PTS1, SignalP, TMHMM, and others.

[0167] Concerning NAC10-like polypeptides, the predicted subcellular localisation of SEQ ID NO: 28 using the PSort algorithm is the cytoplasmic or nuclear compartment (see Example 5). Given its function as transcriptional activator, the subcellular localisation is most likely the nucleus.

[0168] Furthermore, IAA2-like polypeptides (at least in their native form) typically have protein binding activity. Tools and techniques for measuring protein binding activity are well known in the art and include for example, immuno precipitation of protein complexes or yeast two hybrid. Tools and techniques for measuring the association of IAA and ARF polypeptide are well known in the art., and include for example yeast two hybrid analysis (see for example Fukaki et al. (Plant J. 44, 382-395, 2005).

[0169] In addition, IAA2-like polypeptides, when expressed in rice according to the methods of the present invention as outlined in the Examples section, give plants having increased yield related traits, in particular increased seed yield

[0170] In addition, IAA2-like polypeptides, when expressed in rice according to the methods of the present invention as outlined in the Examples section, give plants having increased yield related traits such as increase seed fill rate and increased harvest index.

[0171] Additionally, IAA2-like polypeptides may display a preferred subcellular localization, typically one or more of nuclear, citoplasmic, chloroplastic, or mitochondrial. The task of protein subcellular localisation prediction is important and well studied. Knowing a protein's localisation helps elucidate its function. Experimental methods for protein localization range from immunolocalization to tagging of proteins using green fluorescent protein (GFP) or beta-glucuronidase (GUS). Such methods are accurate although labor-intensive compared with computational methods. Recently much progress has been made in computational prediction of protein localisation from sequence data. Among algorithms well known to a person skilled in the art are available at the ExPASy Proteomics tools hosted by the Swiss Institute for Bioinformatics, for example, PSort, TargetP, ChloroP, LocTree, Predotar, LipoP, MITOPROT, PATS, PTS1, SignalP, TMHMM, and others.

[0172] Furthermore, NAC10-like polypeptides (at least in their native form) typically have DNA-binding activity. Tools and techniques for measuring DNA-binding activity are well known in the art, including PCR-assisted DNA binding site selection and a DNA binding gel-shift assay; for a general reference, see Current Protocols in Molecular Biology, Volumes 1 and 2, Ausubel et al. (1994), Current Protocols.

[0173] In addition, NAC10-like polypeptides, when expressed in rice according to the methods of the present invention as outlined in the Examples section, give plants having increased yield related traits, in particular increased resistance to salt, drought or cold stress in the vegetative phase of plant growth.

[0174] Concerning IAA2-like polypeptides, the present invention is illustrated by transforming plants with the nucleic acid sequence represented by SEQ ID NO: 1, encoding the polypeptide sequence of SEQ ID NO: 2. However, performance of the invention is not restricted to these sequences; the methods of the invention may advantageously be performed using any IAA2-like-encoding nucleic acid or IAA2-like polypeptide as defined herein.

[0175] Examples of nucleic acids encoding IAA2-like polypeptides are given in Table A1 of the Examples section herein. Such nucleic acids are useful in performing the methods of the invention. The amino acid sequences given in Table A1 of the Examples section are example sequences of orthologues and paralogues of the IAA2-like polypeptide represented by SEQ ID NO: 2, the terms “orthologues” and “paralogues” being as defined herein. Further orthologues and paralogues may readily be identified by performing a so-called reciprocal blast search. Typically, this involves a first BLAST involving BLASTing a query sequence (for example using any of the sequences listed in Table A of the Examples section) against any sequence database, such as the publicly available NCBI database. BLASTN or TBLASTX (using standard default values) are generally used when starting from a nucleotide sequence, and BLASTP or TBLASTN (using standard default values) when starting from a protein sequence. The BLAST results may optionally be filtered. The full-length sequences of either the filtered results or non-filtered results are then BLASTed back (second BLAST) against sequences from the organism from which the query sequence is derived (where the query sequence is SEQ ID NO: 1 or SEQ ID NO: 2, the second BLAST would therefore be against rice sequences). The results of the first and second BLASTs are then compared. A paralogue is identified if a high-ranking hit from the first blast is from the same species as from which the query sequence is derived, a BLAST back then ideally results in the query sequence amongst the highest hits; an orthologue is identified if a high-ranking hit in the first BLAST is not from the same species as from which the query sequence is derived, and preferably results upon BLAST back in the query sequence being among the highest hits.

[0176] Concerning NAC10-like polypeptides, the present invention is illustrated by transforming plants with the nucleic acid sequence represented by SEQ ID NO: 27, encoding the polypeptide sequence of SEQ ID NO: 28. However, performance of the invention is not restricted to these sequences; the methods of the invention may advantageously be performed using any NAC10-like-encoding nucleic acid or NAC10-like polypeptide as defined herein.

[0177] Examples of nucleic acids encoding NAC10-like polypeptides are given in Table A2 of the Examples section herein. Such nucleic acids are useful in performing the methods of the invention. The amino acid sequences given in Table A2 of the Examples section are example sequences of orthologues and paralogues of the NAC10-like polypeptide represented by SEQ ID NO: 28, the terms “orthologues” and “paralogues” being as defined herein. Further orthologues and paralogues may readily be identified by performing a so-called reciprocal blast search. Typically, this involves a first BLAST involving BLASTing a query sequence (for example using any of the sequences listed in Table A2 of the Examples section) against any sequence database, such as the publicly available NCBI database. BLASTN or TBLASTX (using standard default values) are generally used when starting from a nucleotide sequence, and BLASTP or TBLASTN (using standard default values) when starting from a protein sequence. The BLAST results may optionally be filtered. The full-length sequences of either the filtered results or non-filtered results are then BLASTed back (second BLAST) against sequences from the organism from which the query sequence is derived (where the query sequence is SEQ ID NO: 27 or SEQ ID NO: 28, the second BLAST would therefore be against rice sequences). The results of the first and second BLASTs are then compared. A paralogue is identified if a high-ranking hit from the first blast is from the same species as from which the query sequence is derived, a BLAST back then ideally results in the query sequence amongst the highest hits; an orthologue is identified if a high-ranking hit in the first BLAST is not from the same species as from which the query sequence is derived, and preferably results upon BLAST back in the query sequence being among the highest hits.

[0178] High-ranking hits are those having a low E-value. The lower the E-value, the more significant the score (or in other words the lower the chance that the hit was found by chance). Computation of the E-value is well known in the art. In addition to E-values, comparisons are also scored by percentage identity. Percentage identity refers to the number of identical nucleotides (or amino acids) between the two compared nucleic acid (or polypeptide) sequences over a particular length. In the case of large families, ClustalW may be used, followed by a neighbour joining tree, to help visualize clustering of related genes and to identify orthologues and paralogues.

[0179] Nucleic acid variants may also be useful in practising the methods of the invention. Examples of such variants include nucleic acids encoding homologues and derivatives of any one of the amino acid sequences given in Table A1 or A2 of the Examples section, the terms “homologue” and “derivative” being as defined herein. Also useful in the methods of the invention are nucleic acids encoding homologues and derivatives of orthologues or paralogues of any one of the amino acid sequences given in Table A1 or A2 of the Examples section. Homologues and derivatives useful in the methods of the present invention have substantially the same biological and functional activity as the unmodified protein from which they are derived. Further variants useful in practising the methods of the invention are variants in which codon usage is optimised or in which miRNA target sites are removed.

[0180] Further nucleic acid variants useful in practising the methods of the invention include portions of nucleic acids encoding IAA-like polypeptides or NAC10-like polypeptides, nucleic acids hybridising to nucleic acids encoding IAA-like polypeptides or NAC10-like polypeptides, splice variants of nucleic acids encoding IAA-like polypeptides or NAC10-like polypeptides, allelic variants of nucleic acids encoding IAA-like polypeptides or NAC10-like polypeptides and variants of nucleic acids encoding IAA-like polypeptides or NAC10-like polypeptides obtained by gene shuffling. The terms hybridising sequence, splice variant, allelic variant and gene shuffling are as described herein.

[0181] Nucleic acids encoding IAA-like polypeptides or NAC10-like polypeptides need not be full-length nucleic acids, since performance of the methods of the invention does not rely on the use of full-length nucleic acid sequences. According to the present invention, there is provided a method for enhancing yield-related traits in plants, comprising introducing and expressing in a plant a portion of any one of the nucleic acid sequences given in Table A1 or A2 of the Examples section, or a portion of a nucleic acid encoding an orthologue, paralogue or homologue of any of the amino acid sequences given in Table A1 or A2 of the Examples section.

[0182] A portion of a nucleic acid may be prepared, for example, by making one or more deletions to the nucleic acid. The portions may be used in isolated form or they may be fused to other coding (or non-coding) sequences in order to, for example, produce a protein that combines several activities. When fused to other coding sequences, the resultant polypeptide produced upon translation may be bigger than that predicted for the protein portion.

[0183] Concerning IAA2-like polypeptides, portions useful in the methods of the invention, encode an IAA2-like polypeptide as defined herein, and have substantially the same biological activity as the amino acid sequences given in Table A1 of the Examples section. Preferably, the portion is a portion of any one of the nucleic acids given in Table A1 of the Examples section, or is a portion of a nucleic acid encoding an orthologue or paralogue of any one of the amino acid sequences given in Table A1 of the Examples section. Preferably the portion is at least 100, 200, 300, 400, 500, 550, 600, 650, 700, 750, 800, 850, 900, 950, 1000, 1050, 1100, 1150, 1200, 1250, 1300, 1350, 1400, 1450, 1500, 1550, 1600, 1650, 1700 consecutive nucleotides in length, the consecutive nucleotides being of any one of the nucleic acid sequences given in Table A1 of the Examples section, or of a nucleic acid encoding an orthologue or paralogue of any one of the amino acid sequences given in Table A1 of the Examples section. Most preferably the portion is a portion of the nucleic acid of SEQ ID NO: 1. Preferably, the portion encodes a fragment of an amino acid sequence comprising an AUX/IAA domain (PFAM accession number PF2309, InterPro entry IPR003311) and the protein motif: Motif 1, SEQ ID NO: 22: (K/N)(I/M/L)F(S/Y)(Q/G)L.

[0184] Concerning NAC10-like polypeptides, portions useful in the methods of the invention, encode a NAC10-like polypeptide as defined herein, and have substantially the same biological activity as the amino acid sequences given in Table A2 of the Examples section. Preferably, the portion is a portion of any one of the nucleic acids given in Table A2 of the Examples section, or is a portion of a nucleic acid encoding an orthologue or paralogue of any one of the amino acid sequences given in Table A2 of the Examples section. Preferably the portion is at least 500, 550, 600, 650, 700, 750, 800, 850, 900, 950, 1000, 1050, 1100, 1150, 1200, 1250, 1300, 1350, 1400, 1450, 1500, 1550, 1600, 1650, 1700, 1750, 1800, 1850, 1900 consecutive nucleotides in length, the consecutive nucleotides being of any one of the nucleic acid sequences given in Table A2 of the Examples section, or of a nucleic acid encoding an orthologue or paralogue of any one of the amino acid sequences given in Table A2 of the Examples section. Most preferably the portion is a portion of the nucleic acid of SEQ ID NO: 27, comprising the NAM domain and one or more of the motifs I to III. Preferably, the portion encodes a fragment of an amino acid sequence which, when used in the construction of a phylogenetic tree, such as the one depicted in FIG. 5, clusters with the group of NAC10-like polypeptides comprising the amino acid sequence represented by SEQ ID NO: 28 (Subgroup I) rather than with any other group and is functionally equivalent to SEQ ID NO: 28.

[0185] Another nucleic acid variant useful in the methods of the invention is a nucleic acid capable of hybridising, under reduced stringency conditions, preferably under stringent conditions, with a nucleic acid encoding an IAA-like polypeptide or a NAC10-like polypeptide as defined herein, or with a portion as defined herein.

[0186] According to the present invention, there is provided a method for enhancing yield-related traits in plants, comprising introducing and expressing in a plant a nucleic acid capable of hybridising to any one of the nucleic acids given in Table A1 and/or A2 of the Examples section, or comprising introducing and expressing in a plant a nucleic acid capable of hybridising to a nucleic acid encoding an orthologue, paralogue or homologue of any of the nucleic acid sequences given in Table A1 and/or A2 of the Examples section.

[0187] Concerning IAA2-like polypeptides, hybridising sequences useful in the methods of the invention encode an IAA2-like polypeptide as defined herein, having substantially the same biological activity as the amino acid sequences given in Table A1 of the Examples section. Preferably, the hybridising sequence is capable of hybridising to the complement of any one of the nucleic acids given in Table A1 of the Examples section, or to a portion of any of these sequences, a portion being as defined above, or the hybridising sequence is capable of hybridising to the complement of a nucleic acid encoding an orthologue or paralogue of any one of the amino acid sequences given in Table A1 of the Examples section. Most preferably, the hybridising sequence is capable of hybridising to the complement of a nucleic acid as represented by SEQ ID NO: 1 or to a portion thereof.

[0188] Preferably, the hybridising sequence or its complementary sequence encodes a polypeptide with an amino acid sequence comprising an AUX/IAA domain (PFAM accession number PF2309, InterPro entry IPR003311) and the protein motif: Motif 1, SEQ ID NO: 22: (K/N)(I/M/L)F(S/Y)(Q/G)L.

[0189] Concerning NAC10-like polypeptides, hybridising sequences useful in the methods of the invention encode a NAC10-like polypeptide as defined herein, having substantially the same biological activity as the amino acid sequences given in Table A2 of the Examples section. Preferably, the hybridising sequence is capable of hybridising to the complement of any one of the nucleic acids given in Table A2 of the Examples section, or to a portion of any of these sequences, a portion being as defined above, or the hybridising sequence is capable of hybridising to the complement of a nucleic acid encoding an orthologue or paralogue of any one of the amino acid sequences given in Table A2 of the Examples section. Most preferably, the hybridising sequence is capable of hybridising to the complement of a nucleic acid as represented by SEQ ID NO: 27 or to a portion thereof.

[0190] Preferably, the hybridising sequence encodes a polypeptide with an amino acid sequence which comprises the NAM domain and one or more of motifs I to III (as defined above) and which, when full-length and used in the construction of a phylogenetic tree such as the one depicted in FIG. 5, clusters with the group of NAC10-like polypeptides comprising the amino acid sequence represented by SEQ ID NO: 28 (Subgroup I) rather than with any other group and is functionally equivalent to SEQ ID NO: 28.

[0191] Another nucleic acid variant useful in the methods of the invention is a splice variant encoding an IAA-like polypeptide or a NAC10-like polypeptide as defined hereinabove, a splice variant being as defined herein.

[0192] According to the present invention, there is provided a method for enhancing yield-related traits in plants, comprising introducing and expressing in a plant a splice variant of any one of the nucleic acid sequences given in Table A1 or Table A2 of the Examples section, or a splice variant of a nucleic acid encoding an orthologue, paralogue or homologue of any of the amino acid sequences given in Table A1 or Table A2 of the Examples section.

[0193] Concerning IAA2-like polypeptides, preferred splice variants are splice variants of a nucleic acid represented by SEQ ID NO: 1, or a splice variant of a nucleic acid encoding an orthologue or paralogue of SEQ ID NO: 2. Preferably, the amino acid sequence encoded by the splice variant comprises an AUX/IAA domain (PFAM accession number PF2309, InterPro entry IPR003311) and the protein motif: Motif 1, SEQ ID NO: 22: (K/N)(I/M/L)F(S/Y)(Q/G)L.

[0194] Concerning NAC10-like polypeptides, preferred splice variants are splice variants of a nucleic acid represented by SEQ ID NO: 27, or a splice variant of a nucleic acid encoding an orthologue or paralogue of SEQ ID NO: 28. Preferably, the amino acid sequence encoded by the splice variant which comprises the NAM domain and one or more of motifs I to III (as defined above) and which, when full-length and used in the construction of a phylogenetic tree such as the one depicted in FIG. 5, clusters with the group of NAC10-like polypeptides comprising the amino acid sequence represented by SEQ ID NO: 28 (Subgroup I) rather than with any other group and is functionally equivalent to SEQ ID NO: 28.

[0195] Another nucleic acid variant useful in performing the methods of the invention is an allelic variant of a nucleic acid encoding an IAA-like polypeptide or a NAC10-like polypeptide as defined hereinabove, an allelic variant being as defined herein.

[0196] According to the present invention, there is provided a method for enhancing yield-related traits in plants, comprising introducing and expressing in a plant an allelic variant of any one of the nucleic acids given in Table A1 or Table A2 of the Examples section, or comprising introducing and expressing in a plant an allelic variant of a nucleic acid encoding an orthologue, paralogue or homologue of any of the amino acid sequences given in Table A1 or Table A2 of the Examples section.

[0197] Concerning IAA2-like polypeptides, the polypeptides encoded by allelic variants useful in the methods of the present invention have substantially the same biological activity as the IAA2-like polypeptide of SEQ ID NO: 2 and any of the amino acids depicted in Table A1 of the Examples section. Allelic variants exist in nature, and encompassed within the methods of the present invention is the use of these natural alleles. Preferably, the allelic variant is an allelic variant of SEQ ID NO: 1 or an allelic variant of a nucleic acid encoding an orthologue or paralogue of SEQ ID NO: 2. Preferably, the amino acid sequence encoded by the allelic variant comprises an AUX/IAA domain (PFAM accession number PF2309, InterPro entry IPR003311) and the protein motif: Motif 1, SEQ ID NO: 22: (K/N)(I/M/L)F(S/Y)(Q/G)L.

[0198] Concerning NAC10-like polypeptides, the polypeptides encoded by allelic variants useful in the methods of the present invention have substantially the same biological activity as the NAC10-like polypeptide of SEQ ID NO: 28 and any of the amino acids depicted in Table A2 of the Examples section. Allelic variants exist in nature, and encompassed within the methods of the present invention is the use of these natural alleles. Preferably, the allelic variant is an allelic variant of SEQ ID NO: 27 or an allelic variant of a nucleic acid encoding an orthologue or paralogue of SEQ ID NO: 28. Preferably, the amino acid sequence encoded by the allelic variant, which comprises the NAM domain and one or more of motifs I to III (as defined above) and which, when full-length and used in the construction of a phylogenetic tree such as the one depicted in FIG. 5, clusters with the group of NAC10-like polypeptides comprising the amino acid sequence represented by SEQ ID NO: 28 (Subgroup 1) rather than with any other group and is functionally equivalent to SEQ ID NO: 28.

[0199] Gene shuffling or directed evolution may also be used to generate variants of nucleic acids encoding IAA-like polypeptides or NAC10-like polypeptides as defined above; the term “gene shuffling” being as defined herein.

[0200] According to the present invention, there is provided a method for enhancing yield-related traits in plants, comprising introducing and expressing in a plant a variant of any one of the nucleic acid sequences given in Table A1 or Table A2 of the Examples section, or comprising introducing and expressing in a plant a variant of a nucleic acid encoding an orthologue, paralogue or homologue of any of the amino acid sequences given in Table A1 or Table A2 of the Examples section, which variant nucleic acid is obtained by gene shuffling.

[0201] Concerning IAA2-like polypeptides, preferably, the amino acid sequence encoded by the variant nucleic acid obtained by gene shuffling comprises an AUX/IAA domain (PFAM accession number PF2309, InterPro entry IPR003311) and the protein motif: Motif 1, SEQ ID NO: 22: (K/N)(I/M/L)F(S/Y)(Q/G)L.

[0202] Concerning NAC10-like polypeptides, preferably, the amino acid sequence encoded by the variant nucleic acid obtained by gene shuffling, which comprises the NAM domain and one or more of motifs I to III (as defined above) and which, when full-length and used in the construction of a phylogenetic tree such as the one depicted in FIG. 5, clusters with the group of NAC10-like polypeptides comprising the amino acid sequence represented by SEQ ID NO: 28 (Subgroup I) rather than with any other group and is functionally equivalent to SEQ ID NO: 28.

[0203] Furthermore, nucleic acid variants may also be obtained by site-directed mutagenesis. Several methods are available to achieve site-directed mutagenesis, the most common being PCR based methods (Current Protocols in Molecular Biology. Wiley Eds.).

[0204] Nucleic acids encoding IAA2-like polypeptides may be derived from any natural or artificial source. The nucleic acid may be modified from its native form in composition and/or genomic environment through deliberate human manipulation. Preferably the IAA2-like polypeptide-encoding nucleic acid is from a plant, further preferably from a monocotyledonous plant, more preferably from the family Poaceae, most preferably the nucleic acid is from Oryza sativa.

[0205] Nucleic acids encoding NAC10-like polypeptides may be derived from any natural or artificial source. The nucleic acid may be modified from its native form in composition and/or genomic environment through deliberate human manipulation. Preferably the NAC10-like polypeptide-encoding nucleic acid is from a plant, further preferably from a monocotyledonous plant, more preferably from the family Poaceae, most preferably the nucleic acid is from Oryza sativa.

[0206] Performance of the methods of the invention gives plants having enhanced yield-related traits. In particular performance of the methods of the invention gives plants having increased yield, especially increased seed yield relative to control plants. The terms “yield” and “seed yield” are described in more detail in the “definitions” section herein.

[0207] Reference herein to enhanced yield-related traits is taken to mean an increase in biomass (weight) of one or more parts of a plant, which may include aboveground (harvestable) parts and/or (harvestable) parts below ground. In particular, such harvestable parts are seeds, and performance of the methods of the invention results in plants having increased seed yield relative to the seed yield of control plants.

[0208] Taking corn as an example, a yield increase may be manifested as one or more of the following: increase in the number of plants established per square meter, an increase in the number of ears per plant, an increase in the number of rows, number of kernels per row, kernel weight, thousand kernel weight, ear length/diameter, increase in the seed filling rate (which is the number of filled seeds divided by the total number of seeds and multiplied by 100), among others.

[0209] Taking rice as an example, a yield increase may manifest itself as an increase in one or more of the following: number of plants per square meter, number of panicles per plant, panicle length, number of spikelets per panicle, number of flowers (florets) per panicle, increase in the seed filling rate (which is the number of filled seeds divided by the total number of seeds and multiplied by 100), increase in thousand kernel weight, among others. In rice, submergence tolerance may also result in increased yield.

[0210] The present invention provides a method for increasing yield, especially seed yield of plants, relative to control plants, which method comprises modulating expression in a plant of a nucleic acid encoding an IAA-like polypeptide or a NAC10-like polypeptide as defined herein.

[0211] Since the transgenic plants according to the present invention have increased yield, it is likely that these plants exhibit an increased growth rate (during at least part of their life cycle), relative to the growth rate of control plants at a corresponding stage in their life cycle.

[0212] The increased growth rate may be specific to one or more parts of a plant (including seeds), or may be throughout substantially the whole plant. Plants having an increased growth rate may have a shorter life cycle. The life cycle of a plant may be taken to mean the time needed to grow from a dry mature seed up to the stage where the plant has produced dry mature seeds, similar to the starting material. This life cycle may be influenced by factors such as speed of germination, early vigour, growth rate, greenness index, flowering time and speed of seed maturation. The increase in growth rate may take place at one or more stages in the life cycle of a plant or during substantially the whole plant life cycle. Increased growth rate during the early stages in the life cycle of a plant may reflect enhanced vigour. The increase in growth rate may alter the harvest cycle of a plant allowing plants to be sown later and/or harvested sooner than would otherwise be possible (a similar effect may be obtained with earlier flowering time). If the growth rate is sufficiently increased, it may allow for the further sowing of seeds of the same plant species (for example sowing and harvesting of rice plants followed by sowing and harvesting of further rice plants all within one conventional growing period). Similarly, if the growth rate is sufficiently increased, it may allow for the further sowing of seeds of different plants species (for example the sowing and harvesting of corn plants followed by, for example, the sowing and optional harvesting of soybean, potato or any other suitable plant). Harvesting additional times from the same rootstock in the case of some crop plants may also be possible. Altering the harvest cycle of a plant may lead to an increase in annual biomass production per square meter (due to an increase in the number of times (say in a year) that any particular plant may be grown and harvested). An increase in growth rate may also allow for the cultivation of transgenic plants in a wider geographical area than their wild-type counterparts, since the territorial limitations for growing a crop are often determined by adverse environmental conditions either at the time of planting (early season) or at the time of harvesting (late season). Such adverse conditions may be avoided if the harvest cycle is shortened. The growth rate may be determined by deriving various parameters from growth curves, such parameters may be: T-Mid (the time taken for plants to reach 50% of their maximal size) and T-90 (time taken for plants to reach 90% of their maximal size), amongst others.

[0213] According to a preferred feature of the present invention, performance of the methods of the invention gives plants having an increased growth rate relative to control plants. Therefore, according to the present invention, there is provided a method for increasing the growth rate of plants, which method comprises modulating expression in a plant of a nucleic acid encoding an IAA-like polypeptide or a NAC10-like polypeptide as defined herein.

[0214] An increase in yield and/or growth rate occurs whether the plant is under non-stress conditions or whether the plant is exposed to various stresses compared to control plants. Plants typically respond to exposure to stress by growing more slowly. In conditions of severe stress, the plant may even stop growing altogether. Mild stress on the other hand is defined herein as being any stress to which a plant is exposed which does not result in the plant ceasing to grow altogether without the capacity to resume growth. Mild stress in the sense of the invention leads to a reduction in the growth of the stressed plants of less than 40%, 35% or 30%, preferably less than 25%, 20% or 15%, more preferably less than 14%, 13%, 12%, 11% or 10% or less in comparison to the control plant under non-stress conditions. Due to advances in agricultural practices (irrigation, fertilization, pesticide treatments) severe stresses are not often encountered in cultivated crop plants. As a consequence, the compromised growth induced by mild stress is often an undesirable feature for agriculture. Mild stresses are the everyday biotic and/or abiotic (environmental) stresses to which a plant is exposed. Abiotic stresses may be due to drought or excess water, anaerobic stress, salt stress, chemical toxicity, oxidative stress and hot, cold or freezing temperatures. The abiotic stress may be an osmotic stress caused by a water stress (particularly due to drought), salt stress, oxidative stress or an ionic stress. Biotic stresses are typically those stresses caused by pathogens, such as bacteria, viruses, fungi, nematodes and insects. The term “non-stress” conditions as used herein are those environmental conditions that allow optimal growth of plants. Persons skilled in the art are aware of normal soil conditions and climatic conditions for a given location. The term non-stress conditions as used herein, encompasses the occasional or everyday mild stresses to which a plant is exposed, as defined herein, but does not encompass severe stresses.

[0215] In particular, the methods of the present invention may be performed under conditions of drought, cold or salt stress, to give plants having increased yield relative to control plants. As reported in Wang et al. (Planta (2003) 218: 1-14), abiotic stress leads to a series of morphological, physiological, biochemical and molecular changes that adversely affect plant growth and productivity. Drought, salinity, extreme temperatures and oxidative stress are known to be interconnected and may induce growth and cellular damage through similar mechanisms. Rabbani et al. (Plant Physiol (2003) 133: 1755-1767) describes a particularly high degree of “cross talk” between drought stress and high-salinity stress. For example, drought and/or salinisation are manifested primarily as osmotic stress, resulting in the disruption of homeostasis and ion distribution in the cell. Oxidative stress, which frequently accompanies high or low temperature, salinity or drought stress, may cause denaturing of functional and structural proteins. As a consequence, these diverse environmental stresses often activate similar cell signalling pathways and cellular responses, such as the production of stress proteins, up-regulation of anti-oxidants, accumulation of compatible solutes and growth arrest. The term “non-stress” conditions as used herein are those environmental conditions that allow optimal growth of plants. Persons skilled in the art are aware of normal soil conditions and climatic conditions for a given location. Plants with optimal growth conditions, (grown under non-stress conditions) typically yield in increasing order of preference at least 97%, 95%, 92%, 90%, 87%, 85%, 83%, 80%, 77% or 75% of the average production of such plant in a given environment. Average production may be calculated on harvest and/or season basis. Persons skilled in the art are aware of average yield productions of a crop.

[0216] Concerning IAA2-like polypeptides, performance of the methods of the invention gives plants grown under non-stress conditions or under mild drought conditions increased yield relative to control plants grown under comparable conditions. Therefore, according to the present invention, there is provided a method for increasing yield in plants grown under non-stress conditions or under mild drought conditions, which method comprises modulating expression in a plant of a nucleic acid encoding an IAA2-like polypeptide.

[0217] Concerning NAC10-like polypeptides, performance of the methods of the invention gives plants grown under non-stress conditions increased yield relative to control plants grown under comparable conditions. Therefore, according to the present invention, there is provided a method for increasing yield in plants grown under non-stress conditions or under mild drought conditions, which method comprises modulating expression in a plant of a nucleic acid encoding a NAC10-like polypeptide.

[0218] Performance of the methods of the invention gives plants grown under conditions of nutrient deficiency, particularly under conditions of nitrogen deficiency, increased yield relative to control plants grown under comparable conditions. Because of the strong influence of nutrition utilization efficiency on plant yield and product quality, a huge amount of fertilizer is poured onto fields to optimize plant growth and quality. Productivity of plants ordinarily is limited by three primary nutrients, phosphorous, potassium and nitrogen, which is usually the rate-limiting element in plant growth of these three. Therefore the major nutritional element required for plant growth is nitrogen (N). It is a constituent of numerous important compounds found in living cells, including amino acids, proteins (enzymes), nucleic acids, and chlorophyll. 1.5% to 2% of plant dry matter is nitrogen and approximately 16% of total plant protein. Thus, nitrogen availability is a major limiting factor for crop plant growth and production (Frink et al. (1999) Proc Natl Acad Sci USA 96(4): 1175-1180), and has as well a major impact on protein accumulation and amino acid composition. Therefore, of great interest are crop plants with increased yield-related traits, when grown under nitrogen-limiting conditions. Thus, according to the present invention, there is provided a method for increasing yield in plants grown under conditions of nutrient deficiency, which method comprises modulating expression in a plant of a nucleic acid encoding an IAA-like polypeptide or a NAC10-like polypeptide. Nutrient deficiency may result from a lack of nutrients such as nitrogen, phosphates and other phosphorous-containing compounds, potassium, calcium, magnesium, manganese, iron and boron, amongst others.

[0219] Performance of the methods of the invention gives plants grown under conditions of salt stress, increased yield relative to control plants grown under comparable conditions. Therefore, according to the present invention, there is provided a method for increasing yield in plants grown under conditions of salt stress, which method comprises modulating expression in a plant of a nucleic acid encoding an IAA-like polypeptide or a NAC10-like polypeptide. The term salt stress is not restricted to common salt (NaCl), but may be any one or more of: NaCl, KCl, LiCl, MgCl₂, CaCl₂, amongst others.

[0220] In a further embodiment, the invention provides genes having altered expression levels in plants overexpressing a NAC10-like protein relative to expression levels in corresponding wild type plants. Furthermore, the present invention provides means to modulate expression of these genes, which in turn allows for modulation of the biological processes that they control. The present invention provides methods to mimic NAC10-like protein level and/or activity by manipulating downstream factors involved in NAC10-like pathways. This strategy allows a fine-tuning of the effects of NAC10-like protein. Whereas overexpression of NAC10-like protein can be pleiotropic and/or can have pleiotropic effects, the invention provides methods to alter plant characteristics in a more controlled and targeted way, by using the NAC10-like protein target genes as defined by the present invention. Modulation of particular biological processes is now possible and may give rise to plants having altered characteristics, which may have particularly useful applications in agriculture and horticulture, such as improved yield-related traits for plants grown under normal or under stress conditions.

[0221] Therefore, according to the present invention, there is provided a method to enhance one or more yield-related traits in plants, comprising modifying in a plant expression of one or more nucleic acids and/or modifying level and/or activity of one or more proteins, which nucleic acids or proteins are essentially similar to any one of the genes listed in Tables I to K, and wherein said one or more yield-related traits are altered relative to corresponding wild type plants.

[0222] The present invention encompasses plants or parts thereof (including seeds) obtainable by the methods according to the present invention. The plants or parts thereof comprise a nucleic acid transgene encoding an IAA-like polypeptide or a NAC10-like polypeptide as defined above.

[0223] The invention also provides genetic constructs and vectors to facilitate introduction and/or expression in plants of nucleic acids encoding IAA-like polypeptides or NAC10-like polypeptides. The gene constructs may be inserted into vectors, which may be commercially available, suitable for transforming into plants and suitable for expression of the gene of interest in the transformed cells. The invention also provides use of a gene construct as defined herein in the methods of the invention.

[0224] More specifically, the present invention provides a construct comprising:
[0225] (a) a nucleic acid encoding an IAA-like polypeptide or a NAC10-like polypeptide as defined above;
[0226] (b) one or more control sequences capable of driving expression of the nucleic acid sequence of (a); and optionally
[0227] (c) a transcription termination sequence.

[0228] Preferably, the nucleic acid encoding an IAA-like polypeptide or a NAC10-like polypeptide is as defined above. The term “control sequence” and “termination sequence” are as defined herein.

[0229] Plants are transformed with a vector comprising any of the nucleic acids described above. The skilled artisan is well aware of the genetic elements that must be present on the vector in order to successfully transform, select and propagate host cells containing the sequence of interest. The sequence of interest is operably linked to one or more control sequences (at least to a promoter).

[0230] Advantageously, any type of promoter, whether natural or synthetic, may be used to drive expression of the nucleic acid sequence, but preferably the promoter is of plant origin. A constitutive promoter is particularly useful in the methods. Preferably the constitutive promoter is a ubiquitous constitutive promoter of medium strength. See the “Definitions” section herein for definitions of the various promoter types. Concerning NAC10-like polypeptides, also useful in the methods of the invention is a root-specific promoter.

[0231] Concerning IAA2-like polypeptides, it should be clear that the applicability of the present invention is not restricted to the IAA2-like polypeptide-encoding nucleic acid represented by SEQ ID NO: 1, nor is the applicability of the invention restricted to expression of an IAA2-like polypeptide-encoding nucleic acid when driven by a constitutive promoter.

[0232] The constitutive promoter is preferably a medium strength promoter, more preferably selected from a plant derived promoter, such as a GOS2 promoter, more preferably is the promoter GOS2 promoter from rice. Further preferably the constitutive promoter is represented by a nucleic acid sequence substantially similar to SEQ ID NO: 26, most preferably the constitutive promoter is as represented by SEQ ID NO: 26. See the “Definitions” section herein for further examples of constitutive promoters.

[0233] Optionally, one or more terminator sequences may be used in the construct introduced into a plant. Preferably, the construct comprises an expression cassette comprising a GOS2 promoter, substantially similar to SEQ ID NO: 26, and the nucleic acid encoding the IAA2-like polypeptide.

[0234] Concerning NAC10-like polypeptides, it should be clear that the applicability of the present invention is not restricted to the NAC10-like polypeptide-encoding nucleic acid represented by SEQ ID NO: 27, nor is the applicability of the invention restricted to expression of a NAC10-like polypeptide-encoding nucleic acid when driven by a constitutive promoter, or when driven by a root-specific promoter.

[0235] The constitutive promoter is preferably a medium strength constitutive promoter, more preferably selected from a plant, such as a GOS2 promoter, more preferably the promoter is a GOS2 promoter from rice. Further preferably the constitutive promoter is represented by a nucleic acid sequence substantially similar to SEQ ID NO: 382, most preferably the constitutive promoter is as represented by SEQ ID NO: 382. See the “Definitions” section herein for further examples of constitutive promoters.

[0236] According to another preferred feature of the invention, the nucleic acid encoding a NAC10-like polypeptide is operably linked to a root-specific promoter. The root-specific promoter is preferably an RCc3 promoter (Plant Mol Biol. 1995 January; 27(2):237-48), more preferably the RCc3 promoter is from rice, further preferably the RCc3 promoter is represented by a nucleic acid sequence substantially similar to SEQ ID NO: 383, most preferably the promoter is as represented by SEQ ID NO: 383. Examples of other root-specific promoters which may also be used to perform the methods of the invention are shown in Table 3 in the “Definitions” section above.

[0237] Optionally, one or more terminator sequences may be used in the construct introduced into a plant. Preferably, the construct comprises an expression cassette comprising a GOS2 or an RCc3 promoter, substantially similar to SEQ ID NO: 382, respectively SEQ ID NO: 383, and the nucleic acid encoding the NAC10-like polypeptide.

[0238] Additional regulatory elements may include transcriptional as well as translational enhancers. Those skilled in the art will be aware of terminator and enhancer sequences that may be suitable for use in performing the invention. An intron sequence may also be added to the 5′ untranslated region (UTR) or in the coding sequence to increase the amount of the mature message that accumulates in the cytosol, as described in the definitions section. Other control sequences (besides promoter, enhancer, silencer, intron sequences, 3′UTR and/or 5′UTR regions) may be protein and/or RNA stabilizing elements. Such sequences would be known or may readily be obtained by a person skilled in the art.

[0239] The genetic constructs of the invention may further include an origin of replication sequence that is required for maintenance and/or replication in a specific cell type. One example is when a genetic construct is required to be maintained in a bacterial cell as an episomal genetic element (e.g. plasmid or cosmid molecule). Preferred origins of replication include, but are not limited to, the f1-ori and colE1.

[0240] For the detection of the successful transfer of the nucleic acid sequences as used in the methods of the invention and/or selection of transgenic plants comprising these nucleic acids, it is advantageous to use marker genes (or reporter genes). Therefore, the genetic construct may optionally comprise a selectable marker gene. Selectable markers are described in more detail in the “definitions” section herein. The marker genes may be removed or excised from the transgenic cell once they are no longer needed. Techniques for marker removal are known in the art, useful techniques are described above in the definitions section.

[0241] The invention also provides a method for the production of transgenic plants having enhanced yield-related traits relative to control plants, comprising introduction and expression in a plant of any nucleic acid encoding an IAA-like polypeptide or a NAC10-like polypeptide as defined hereinabove.

[0242] More specifically, the present invention provides a method for the production of transgenic plants having enhanced yield-related traits, particularly increased stress resistance and/or increased yield, which method comprises:
[0243] (i) introducing and expressing in a plant or plant cell a nucleic acid encoding an IAA-like polypeptide or a NAC10-like polypeptide; and
[0244] (ii) cultivating the plant cell under conditions promoting plant growth and development.

[0245] The nucleic acid of (i) may be any of the nucleic acids capable of encoding an IAA-like polypeptide or a NAC10-like polypeptide as defined herein.

[0246] The nucleic acid may be introduced directly into a plant cell or into the plant itself (including introduction into a tissue, organ or any other part of a plant). According to a preferred feature of the present invention, the nucleic acid is preferably introduced into a plant by transformation. The term “transformation” is described in more detail in the “definitions” section herein.

[0247] The genetically modified plant cells can be regenerated via all methods with which the skilled worker is familiar. Suitable methods can be found in the above-mentioned publications by S. D. Kung and R. Wu, Potrykus or Hofgen and Willmitzer.

[0248] Generally after transformation, plant cells or cell groupings are selected for the presence of one or more markers which are encoded by plant-expressible genes co-transferred with the gene of interest, following which the transformed material is regenerated into a whole plant. To select transformed plants, the plant material obtained in the transformation is, as a rule, subjected to selective conditions so that transformed plants can be distinguished from untransformed plants. For example, the seeds obtained in the above-described manner can be planted and, after an initial growing period, subjected to a suitable selection by spraying. A further possibility consists in growing the seeds, if appropriate after sterilization, on agar plates using a suitable selection agent so that only the transformed seeds can grow into plants. Alternatively, the transformed plants are screened for the presence of a selectable marker such as the ones described above.

[0249] Following DNA transfer and regeneration, putatively transformed plants may also be evaluated, for instance using Southern analysis, for the presence of the gene of interest, copy number and/or genomic organisation. Alternatively or additionally, expression levels of the newly introduced DNA may be monitored using Northern and/or Western analysis, both techniques being well known to persons having ordinary skill in the art.

[0250] The generated transformed plants may be propagated by a variety of means, such as by clonal propagation or classical breeding techniques. For example, a first generation (or T1) transformed plant may be selfed and homozygous second-generation (or T2) transformants selected, and the T2 plants may then further be propagated through classical breeding techniques. The generated transformed organisms may take a variety of forms. For example, they may be chimeras of transformed cells and non-transformed cells; clonal transformants (e.g., all cells transformed to contain the expression cassette); grafts of transformed and untransformed tissues (e.g., in plants, a transformed rootstock grafted to an untransformed scion).

[0251] The present invention clearly extends to any plant cell or plant produced by any of the methods described herein, and to all plant parts and propagules thereof. The present invention extends further to encompass the progeny of a primary transformed or transfected cell, tissue, organ or whole plant that has been produced by any of the aforementioned methods, the only requirement being that progeny exhibit the same genotypic and/or phenotypic characteristic(s) as those produced by the parent in the methods according to the invention.

[0252] The invention also includes host cells containing an isolated nucleic acid encoding an IAA-like polypeptide or a NAC10-like polypeptide as defined hereinabove. Preferred host cells according to the invention are plant cells. Host plants for the nucleic acids or the vector used in the method according to the invention, the expression cassette or construct or vector are, in principle, advantageously all plants, which are capable of synthesizing the polypeptides used in the inventive method.

[0253] The methods of the invention are advantageously applicable to any plant. Plants that are particularly useful in the methods of the invention include all plants which belong to the superfamily Viridiplantae, in particular monocotyledonous and dicotyledonous plants including fodder or forage legumes, ornamental plants, food crops, trees or shrubs. According to a preferred embodiment of the present invention, the plant is a crop plant. Examples of crop plants include soybean, sunflower, canola, alfalfa, rapeseed, linseed, cotton, tomato, potato and tobacco. Further preferably, the plant is a monocotyledonous plant. Examples of monocotyledonous plants include sugarcane. More preferably the plant is a cereal. Examples of cereals include rice, maize, wheat, barley, millet, rye, triticale, sorghum, emmer, spelt, secale, einkorn, teff, milo and oats.

[0254] The invention also extends to harvestable parts of a plant such as, but not limited to seeds, leaves, fruits, flowers, stems, roots, rhizomes, tubers and bulbs, which harvestable parts comprise a recombinant nucleic acid encoding an IAA-like polypeptide or a NAC10-like polypeptide. The invention furthermore relates to products derived, preferably directly derived, from a harvestable part of such a plant, such as dry pellets or powders, oil, fat and fatty acids, starch or proteins.

[0255] According to a preferred feature of the invention, the modulated expression is increased expression. Methods for increasing expression of nucleic acids or genes, or gene products, are well documented in the art and examples are provided in the definitions section.

[0256] As mentioned above, a preferred method for modulating expression of a nucleic acid encoding an IAA-like polypeptide or a NAC10-like polypeptide is by introducing and expressing in a plant a nucleic acid encoding an IAA-like polypeptide or a NAC10-like polypeptide; however the effects of performing the method, i.e. enhancing yield-related traits may also be achieved using other well known techniques, including but not limited to T-DNA activation tagging, TILLING, homologous recombination. A description of these techniques is provided in the definitions section.

[0257] The present invention also encompasses use of nucleic acids encoding NAC10-like polypeptides as described herein and use of these IAA-like polypeptides or NAC10-like polypeptides in enhancing any of the aforementioned yield-related traits in plants.

[0258] Nucleic acids encoding NAC10-like polypeptide described herein, or the IAA-like polypeptides or NAC10-like polypeptides themselves, may find use in breeding programmes in which a DNA marker is identified which may be genetically linked to a gene encoding an IAA-like polypeptide or a NAC10-like polypeptide. The nucleic acids/genes, or the IAA-like polypeptides or NAC10-like polypeptides themselves may be used to define a molecular marker. This DNA or protein marker may then be used in breeding programmes to select plants having enhanced yield-related traits as defined hereinabove in the methods of the invention.

[0259] Allelic variants of a nucleic acid/gene encoding IAA-like polypeptides or NAC10-like polypeptides may also find use in marker-assisted breeding programmes. Such breeding programmes sometimes require introduction of allelic variation by mutagenic treatment of the plants, using for example EMS mutagenesis; alternatively, the programme may start with a collection of allelic variants of so called “natural” origin caused unintentionally. Identification of allelic variants then takes place, for example, by PCR. This is followed by a step for selection of superior allelic variants of the sequence in question and which give increased yield. Selection is typically carried out by monitoring growth performance of plants containing different allelic variants of the sequence in question. Growth performance may be monitored in a greenhouse or in the field. Further optional steps include crossing plants in which the superior allelic variant was identified with another plant. This could be used, for example, to make a combination of interesting phenotypic features.

[0260] Nucleic acids encoding IAA-like polypeptides or NAC10-like polypeptides may also be used as probes for genetically and physically mapping the genes that they are a part of, and as markers for traits linked to those genes. Such information may be useful in plant breeding in order to develop lines with desired phenotypes. Such use of nucleic acids encoding IAA-like polypeptides or NAC10-like polypeptides requires only a nucleic acid sequence of at least 15 nucleotides in length. The nucleic acids encoding IAA-like polypeptides or NAC10-like polypeptides may be used as restriction fragment length polymorphism (RFLP) markers. Southern blots (Sambrook J, Fritsch E F and Maniatis T (1989) Molecular Cloning, A Laboratory Manual) of restriction-digested plant genomic DNA may be probed with the NAC10-like-encoding nucleic acids. The resulting banding patterns may then be subjected to genetic analyses using computer programs such as MapMaker (Lander et al. (1987) Genomics 1: 174-181) in order to construct a genetic map. In addition, the nucleic acids may be used to probe Southern blots containing restriction endonuclease-treated genomic DNAs of a set of individuals representing parent and progeny of a defined genetic cross. Segregation of the DNA polymorphisms is noted and used to calculate the position of the nucleic acid encoding IAA-like polypeptides or NAC10-like polypeptides in the genetic map previously obtained using this population (Botstein et al. (1980) Am. J. Hum. Genet. 32:314-331).

[0261] The production and use of plant gene-derived probes for use in genetic mapping is described in Bernatzky and Tanksley (1986) Plant Mol. Biol. Reporter 4: 37-41. Numerous publications describe genetic mapping of specific cDNA clones using the methodology outlined above or variations thereof. For example, F2 intercross populations, backcross populations, randomly mated populations, near isogenic lines, and other sets of individuals may be used for mapping. Such methodologies are well known to those skilled in the art.

[0262] The nucleic acid probes may also be used for physical mapping (i.e., placement of sequences on physical maps; see Hoheisel et al. In: Non-mammalian Genomic Analysis: A Practical Guide, Academic press 1996, pp. 319-346, and references cited therein).

[0263] In another embodiment, the nucleic acid probes may be used in direct fluorescence in situ hybridisation (FISH) mapping (Trask (1991) Trends Genet. 7:149-154). Although current methods of FISH mapping favour use of large clones (several kb to several hundred kb; see Laan et al. (1995) Genome Res. 5:13-20), improvements in sensitivity may allow performance of FISH mapping using shorter probes.

[0264] A variety of nucleic acid amplification-based methods for genetic and physical mapping may be carried out using the nucleic acids. Examples include allele-specific amplification (Kazazian (1989) J. Lab. Clin. Med 11:95-96), polymorphism of PCR-amplified fragments (CAPS; Sheffield et al. (1993) Genomics 16:325-332), allele-specific ligation (Landegren et al. (1988) Science 241:1077-1080), nucleotide extension reactions (Sokolov (1990) Nucleic Acid Res. 18:3671), Radiation Hybrid Mapping (Walter et al. (1997) Nat. Genet. 7:22-28) and Happy Mapping (Dear and Cook (1989) Nucleic Acid Res. 17:6795-6807). For these methods, the sequence of a nucleic acid is used to design and produce primer pairs for use in the amplification reaction or in primer extension reactions. The design of such primers is well known to those skilled in the art. In methods employing PCR-based genetic mapping, it may be necessary to identify DNA sequence differences between the parents of the mapping cross in the region corresponding to the instant nucleic acid sequence. This, however, is generally not necessary for mapping methods.

[0265] The methods according to the present invention result in plants having enhanced yield-related traits, as described hereinbefore. These traits may also be combined with other economically advantageous traits, such as further yield-enhancing traits, tolerance to other abiotic and biotic stresses, traits modifying various architectural features and/or biochemical and/or physiological features.

### Items

[0266] 1. IAA2-like polypeptides
[0267] 1. A method for enhancing yield-related traits in plants relative to control plants, comprising modulating expression in a plant of a nucleic acid encoding an IAA2-like polypeptide, wherein said IAA2-like polypeptide comprises an AUX/IAA domain (PFAM accession number PF2309, InterPro entry IPR003311) domain and the protein motif represented by SEQ ID NO: 22.
[0268] 2. Method according to item 1, wherein said IAA2-like polypeptide comprises one or more of the following motifs:

| | |
|---|---|
| (i) | Motif 2, SEQ ID NO: 23: |
| | (Q/G)LLDG(S/T)G(E/V)YTL |
| (ii) | Motif 3, SEQ ID NO: 24: |
| | LLDGSGEYTLVY |
| (iii) | Motif 4, SEQ ID NO: 25: |
| | KKLELRLGPPG |

[0269] wherein amino acids indicated between brackets at a position represent alternative amino acids at that position.
[0270] 3. Method according to item 1 or 2, wherein said modulated expression is effected by introducing and expressing in a plant a nucleic acid encoding an IAA2-like polypeptide.
[0271] 4. Method according to any one of items 1 to 3, wherein said nucleic acid encoding an IAA2-like polypeptide encodes any one of the proteins listed in Table A1 or is a portion of such a nucleic acid, or a nucleic acid capable of hybridising with such a nucleic acid.
[0272] 5. Method according to any one of items 1 to 4, wherein said nucleic acid sequence encodes an orthologue or paralogue of any of the proteins given in Table A1.
[0273] 6. Method according to any preceding item, wherein said enhanced yield-related traits comprise increased yield, preferably increased biomass and/or increased seed yield relative to control plants.
[0274] 7. Method according to any one of items 1 to 6, wherein said enhanced yield-related traits are obtained under non-stress conditions.
[0275] 8. Method according to any one of items 1 to 6, wherein said enhanced yield-related traits are obtained under conditions of drought stress, salt stress or nitrogen deficiency.
[0276] 9. Method according to any one of items 3 to 8, wherein said nucleic acid is operably linked to a constitutive promoter, preferably to a GOS2 promoter, most preferably to a GOS2 promoter from rice.
[0277] 10. Method according to any one of items 1 to 9, wherein said nucleic acid encoding an IAA2-like polypeptide is of plant origin, preferably from a monocotyledonous plant, further preferably from the family Poaceae, more preferably from the genus Oryza, most preferably from Oryza sativa.
[0278] 11. Plant or part thereof, including seeds, obtainable by a method according to any one of items 1 to 10, wherein said plant or part thereof comprises a recombinant nucleic acid encoding an IAA2-like polypeptide.
[0279] 12. Construct comprising:
   [0280] (i) nucleic acid encoding an IAA2-like polypeptide as defined in items 1 or 2;
   [0281] (ii) one or more control sequences capable of driving expression of the nucleic acid sequence of (a); and optionally
   [0282] (iii) a transcription termination sequence.
[0283] 13. Construct according to item 12, wherein one of said control sequences is a constitutive promoter, preferably a GOS2 promoter, most preferably a GOS2 promoter from rice.
[0284] 14. Use of a construct according to item 12 or 13 in a method for making plants having increased yield, particularly increased biomass and/or increased seed yield relative to control plants.
[0285] 15. Plant, plant part or plant cell transformed with a construct according to item 12 or 13.
[0286] 16. Method for the production of a transgenic plant having increased yield, particularly increased biomass and/or increased seed yield relative to control plants, comprising:
   [0287] (i) introducing and expressing in a plant a nucleic acid encoding an IAA2-like polypeptide as defined in item 1 or 2; and
   [0288] (ii) cultivating the plant cell under conditions promoting plant growth and development.
[0289] 17. Transgenic plant having increased yield, particularly increased biomass and/or increased seed yield, relative to control plants, resulting from modulated expression of a nucleic acid encoding an IAA2-like polypeptide as defined in item 1 or 2, or a transgenic plant cell derived from said transgenic plant.
[0290] 18. Transgenic plant according to item 11, 15 or 17, or a transgenic plant cell derived thereof, wherein said plant is a crop plant or a monocot or a cereal, such as rice, maize, wheat, barley, millet, rye, triticale, sorghum emmer, spelt, secale, einkorn, teff, milo and oats.
[0291] 19. Harvestable parts of a plant according to item 18, wherein said harvestable parts are preferably shoot biomass and/or seeds.
[0292] 20. Products derived from a plant according to item 18 and/or from harvestable parts of a plant according to item 19.
[0293] 21. Use of a nucleic acid encoding an IAA2-like polypeptide in increasing yield, particularly in increasing seed yield and/or shoot biomass in plants, relative to control plants.

### 2. NAC10-Like Polypeptides

[0294] 1. A method for enhancing yield-related traits in plants relative to control plants, comprising modulating expression in a plant of a nucleic acid encoding a NAC10-like polypeptide, wherein said NAC10-like polypeptide comprises a NAM domain (Pfam PF02365).
[0295] 2. Method according to item 1, wherein said NAC10-like polypeptide comprises one or more of the following motifs:

| | |
|---|---|
| (i) | Motif I: |
| | A/P/S/N/V/T T/V/L/I/A/S T/P/S/D/ |
| | V/Q D/V/I/F I A/T/G/P, |
| (ii) | Motif II: |
| | R/N/K E/G/S I/R/S/Q/A/V/L R/Q A/P |
| | N/S/R, |
| (iii) | Motif III: |
| | C/Y R/K L/I/V S/Y/H/F/R N/K/Q K |
| | D/K/N/C/S/T/G/M/A/R |

[0296] 3. Method according to item 1 or 2, wherein said modulated expression is effected by introducing and expressing in a plant a nucleic acid encoding a NAC10-like polypeptide.
[0297] 4. Method according to any one of items 1 to 3, wherein said nucleic acid encoding a NAC10-like polypeptide encodes any one of the proteins listed in Table A2 or is a portion of such a nucleic acid, or a nucleic acid capable of hybridising with such a nucleic acid.
[0298] 5. Method according to any one of items 1 to 4, wherein said nucleic acid sequence encodes an orthologue or paralogue of any of the proteins given in Table A2.
[0299] 6. Method according to any preceding item, wherein said enhanced yield-related traits comprise increased yield, preferably increased biomass and/or increased seed yield relative to control plants.
[0300] 7. Method according to any one of items 1 to 6, wherein said enhanced yield-related traits are obtained under non-stress conditions.
[0301] 8. Method according to any one of items 1 to 6, wherein said enhanced yield-related traits are obtained under conditions of drought stress, salt stress or nitrogen deficiency.
[0302] 9. Method according to any one of items 3 to 8, wherein said nucleic acid is operably linked to a root specific or to a constitutive promoter, preferably to an RCc3 or a GOS2 promoter, most preferably to an RCc3 or a GOS2 promoter from rice.
[0303] 10. Method according to any one of items 1 to 9, wherein said nucleic acid encoding a NAC10-like polypeptide is of plant origin, preferably from a dicotyledonous plant, further preferably from the family Poaceae, more preferably from the genus Oryza, most preferably from Oryza sativa.
[0304] 11. Plant or part thereof, including seeds, obtainable by a method according to any one of items 1 to 10, wherein said plant or part thereof comprises a recombinant nucleic acid encoding a NAC10-like polypeptide.
[0305] 12. Construct comprising:
   [0306] (i) nucleic acid encoding a NAC10-like polypeptide as defined in items 1 or 2;
   [0307] (ii) one or more control sequences capable of driving expression of the nucleic acid sequence of (a); and optionally
   [0308] (iii) a transcription termination sequence.
[0309] 13. Construct according to item 12, wherein one of said control sequences is a root specific or a constitutive promoter, preferably an RCc3 or a GOS2 promoter, most preferably an RCc3 or a GOS2 promoter from rice.
[0310] 14. Use of a construct according to item 12 or 13 in a method for making plants having increased yield, particularly increased biomass and/or increased seed yield relative to control plants.
[0311] 15. Plant, plant part or plant cell transformed with a construct according to item 12 or 13.
[0312] 16. Method for the production of a transgenic plant having increased yield, particularly increased biomass and/or increased seed yield relative to control plants, comprising:
   [0313] (i) introducing and expressing in a plant a nucleic acid encoding a NAC10-like polypeptide as defined in item 1 or 2; and
   [0314] (ii) cultivating the plant cell under conditions promoting plant growth and development.
[0315] 17. Transgenic plant having increased yield, particularly increased biomass and/or increased seed yield, relative to control plants, resulting from modulated expression of a nucleic acid encoding a NAC10-like polypeptide as defined in item 1 or 2, or a transgenic plant cell derived from said transgenic plant.
[0316] 18. Transgenic plant according to item 11, 15 or 17, or a transgenic plant cell derived thereof, wherein said plant is a crop plant or a monocot or a cereal, such as rice, maize, wheat, barley, millet, rye, triticale, sorghum emmer, spelt, secale, einkorn, teff, milo and oats.
[0317] 19. Harvestable parts of a plant according to item 18, wherein said harvestable parts are preferably shoot biomass and/or seeds.
[0318] 20. Products derived from a plant according to item 18 and/or from harvestable parts of a plant according to item 19.
[0319] 21. Use of a nucleic acid encoding a NAC10-like polypeptide in increasing yield, particularly in increasing seed yield and/or shoot biomass in plants, relative to control plants.

### DESCRIPTION OF FIGURES

[0320] The present invention will now be described with reference to the following figures in which:

[0321] FIG. 1 represents a multiple alignment of IAA2-like polypeptides.

[0322] FIG. 2 represents the binary vector used for increased expression in Oryza sativa of an IAA2-like-encoding nucleic acid under the control of a rice GOS2 promoter (pGOS2).

[0323] FIG. 3 represents the domain structure of SEQ ID NO: 28 with the NAM domain (PF02365) indicated in bold and the conserved motifs I to III underlined.

[0324] FIG. 4 represents a multiple alignment of various NAC10-like polypeptides, using ClustalW with default settings for a slow alignment.

[0325] FIG. 5 shows the phylogenetic relationship of the rice NAC family. A phylogenic dendrogram was derived from an alignment of the deduced amino acid sequences of 54 rice NAC factors using the CLUSTAL W program. Of 105 NAC factors predicted from the rice genome, we selected eighteen that have EST information from NCBI database search using the tBLAST N program. Eighteen stress-inducible factors were indicated by boxes. Subgroups I to III shown in Table G are marked by circles.

[0326] FIG. 6 RNA gel-blot analysis was performed using total RNAs from roots and leaves of three homozygous T4 lines of RCc3:OsNAC10 and GOS2:OsNAC10 plants, respectively, and of nontransgenic (NT) control plants. The blots were hybridized with the OsNAC10 gene specific probes, and reprobed for RbcS (Jang et al., 1999) and Tublin. EtBr staining was used to determine equal loading of RNAs. (−) Nullizygous (without transgene) lines, (+) Transgenic lines.

[0327] FIG. 7 Appearance of transgenic plants during drought stress. Three independent homozygous T4 lines of RCc3:OsNAC10 and GOS2:OsNAC10 plants and nontransgenic (NT) controls were grown for 4 weeks, subjected to 3 d of drought stress and followed by 7 d re-watering in the greenhouse. Images were taken at the indicated time points. “+” denotes the number of re-watering days under normal growth conditions.

[0328] FIG. 8 Changes in chlorophyll fluorescence (Fv/Fm) of rice plants under drought, high salinity and low temperature stress conditions. Three independent homozygous T4 lines of RCc3:OsNAC10 and GOS2:OsNAC10 plants and nontransgenic (NT) controls grown in MS medium for 14 days were subjected to various stress conditions as described in the Materials and Methods section. After stress treatments, the Fv/Fm values were measured using a pulse modulation fluorometer (mini-PAM, Walze, Germany). All plants were grown under a continuous light of 150 μmol m-2 s-1 prior to stress treatments. Each data point represents the mean±SE of triplicates (n=10).

[0329] FIG. 9 Agronomic Traits for RCc3:OsNAC10 and GOS2:OsNAC10 Plants Grown in the Field Under Normal and Stress Conditions. Spider plots of agronomic traits of three independent homozygous T4 lines of RCc3:OsNAC10 and GOS2:OsNAC10 plants and corresponding nontransgenic (NT) controls under normal and drought conditions were drawn by using the Microsoft Excel software. Each data point represents percentage of the mean values (n=20) listed in Supplemental Table I and II. Mean values from NT controls were set at 100% as a reference. CL, culm length; PL, panicle length; NP, number of panicles per hill; NSP, number of spikelets per panicle; TNS, total number of spikelets; FR, filling rate; NFG, number of filled grains; TGW, total grain weight; 1,000 GW, thousand grain weight.

[0330] FIG. 10 Transcription Activity of OsNAC10 in Yeast: A full-length cDNA of OsNAC10 and two C-terminal deletion fragments were amplified by PCR and fused to the GAL4-BD vector. Each construct was introduced into Saccharomyces cerevisiae strain AH109. R, the full-length sequence of OsNAC10; R1, C-terminal deletion sequence of OsNAC10 (A323-460); R2, C-terminal deletion sequence of OsNAC10 (Δ244-460). Filled box, NAC domain sequence of OsNAC10 (1-173); unfilled box, activation domain sequence of OsNAC10 (174-460). Transformants were spotted onto SD/-Trp and SD/-His/-Trp media and incubated at 30° C. for 3 days.

[0331] FIG. 11 Alignments of NAC Domain Sequences from 18 Stress-Inducible Rice Genes: Deduced amino acid sequences of the NAC domains of the 18 genes listed in Table 1 were aligned using the CLUSTAL W program. Identical and conserved residues are highlighted (gray). Signature motifs are indicated by boxes with marks on the top as follows: Ia-e, IIa-c, and IIIa for subgroups I-III, respectively.

[0332] FIG. 12 Expression of OsNAC10 Under Stress Conditions and in Various Tissues at Different Developmental Stages of Rice:

[0333] A, Rice seeds were germinated and grown on Murashige and Skoog agar medium in the dark for 2 days (D2) and then in the light for 1 day at 28° C. (L1), and then seedlings were transplanted into soil pots, and grown in the greenhouse for 11 days (14d), for until stage of meiosis (M), and for until just before the stage of heading (BH) and for until right after heading (AH). RT-PCR analyses were performed using RNAs from the indicated tissues at indicated stages of development and gene-specific primers. The expression level of a rice ubiquitin (OsUbi) was used as an internal control. L1C, coleoptiles from L1 seedlings. B, Ten μg of total RNA was prepared from leaf and root tissues of 14 d-old seedlings exposed to drought, high salinity, ABA or low temperature for indicated time points: for drought stress, the seedlings were air-dried at 28° C.; for high-salinity stress, seedlings were exposed to 400 mM NaCl at 28° C.; for low-temperature stress, seedlings were exposed to 4° C.; for ABA, seedlings were exposed to a solution containing 100 μM ABA. Total RNAs were blotted and hybridized with the OsNAC10 gene-specific probes. The blots were then reprobed with the Dip1 (Oh et al., 2005b) gene which was used as a marker for up-regulation of key genes following stress treatments. EtBr staining was used to determine equal loading of RNAs.

[0334] FIG. 13 Regulated Genes in Roots and Leaves of RCc3:OsNAC10 and GOS2:OsNAC10 Plants under Normal and Stress Conditions. Transcript levels OsNAC10 and six target genes were determined by qRT-PCR (using primers listed in Supplemental Table S5 online). Transcript levels of the genes in RCc3:OsNAC10 and GOS2:OsNAC10 were presented as a relative value to that of untreated NT control in root and leaf, respectively. Data were normalized using the rice ubiquitin gene (OsUbi) transcript levels. Values are the means±SD of three independent experiments.

### EXAMPLES

[0335] The present invention will now be described with reference to the following examples, which are by way of illustration alone. The following examples are not intended to completely define or otherwise limit the scope of the invention.

[0336] DNA manipulation: unless otherwise stated, recombinant DNA techniques are performed according to standard protocols described in (Sambrook (2001) Molecular Cloning: a laboratory manual, 3rd Edition Cold Spring Harbor Laboratory Press, CSH, N.Y. ) or in Volumes 1 and 2 of Ausubel et al. (1994), Current Protocols in Molecular Biology, Current Protocols. Standard materials and methods for plant molecular work are described in Plant Molecular Biology Labfax (1993) by R. D. D. Croy, published by BIOS Scientific Publications Ltd (UK) and Blackwell Scientific Publications (UK).

### Example 1

### Identification of Sequences Related to the Nucleic Acid Sequence Used in the Methods of the Invention

[0337] Sequences (full length cDNA, ESTs or genomic) related to the nucleic acid sequence used in the methods of the present invention were identified amongst those maintained in the Entrez Nucleotides database at the National Center for Biotechnology Information (NCBI) using database sequence search tools, such as the Basic Local Alignment Tool (BLAST) (Altschul et al. (1990) J. Mol. Biol. 215:403-410; and Altschul et al. (1997) Nucleic Acids Res. 25:3389-3402). The program is used to find regions of local similarity between sequences by comparing nucleic acid or polypeptide sequences to sequence databases and by calculating the statistical significance of matches. For example, the polypeptide encoded by the nucleic acid used in the present invention was used for the TBLASTN algorithm, with default settings and the filter to ignore low complexity sequences set off. The output of the analysis was viewed by pairwise comparison, and ranked according to the probability score (E-value), where the score reflect the probability that a particular alignment occurs by chance (the lower the E-value, the more significant the hit). In addition to E-values, comparisons were also scored by percentage identity. Percentage identity refers to the number of identical nucleotides (or amino acids) between the two compared nucleic acid (or polypeptide) sequences over a particular length. In some instances, the default parameters may be adjusted to modify the stringency of the search. For example the E-value may be increased to show less stringent matches. This way, short nearly exact matches may be identified.

### 1.1. IAA2-Like Polypeptides

[0338] Table A1 provides a list of nucleic acid sequences related to the IAA2-like nucleic acid sequence useful in the methods of the present invention.

TABLE A1
Examples of IAA2-like polypeptides:

| | Nucleic acid | Polypeptide |
|---|---|---|
| Name | SEQ ID NO: | SEQ ID NO: |
| O. sativa_Os01g0741900#1 | 1 | 2 |
| O. sativa_Os05g0523300#1 | 3 | 4 |
| corn IAA6likeACF83856.1 | 5 | 6 |
| corn_EU965307_IAA6_ACG37425 | 7 | 8 |
| H. vulgare_TC162609#1 | 9 | 10 |
| OslBCD003255\|319\|AUX-IAA indica | 11 | 12 |
| T. aestivum_TC289502#1 | 13 | 14 |
| T. aestivum_TC297212#1 | 15 | 16 |
| T. aestivum_TC350242#1 | 17 | 18 |
| Z. mays_TC410949#1 | 19 | 20 |

### 1.2. NAC 10-Like Polypeptides

[0339] Table A2 provides a list of nucleic acid sequences related to the NAC10-like nucleic acid sequence used in the methods of the present invention.

TABLE A2
Examples of NAC10-like nucleic acids and polypeptides:

| | Nucleic acid | Polypeptide |
|---|---|---|
| Name | SEQ ID NO | SEQ ID NO |
| OsNAC10 | 27 | 28 |
| Os03g0815100 | 29 | 30 |
| Os01g0884300 | 31 | 32 |
| Os11g0184900 | 33 | 34 |
| Os01g0136100 | 35 | 36 |
| Os01g0293600 | 37 | 38 |
| Os01g0666000 | 39 | 40 |
| Os01g0687400 | 41 | 42 |
| Os01g0700100 | 43 | 44 |
| Os0190705200 | 45 | 46 |
| Os01g0775100 | 47 | 48 |
| Os01g0816100 | 49 | 50 |
| Os01g0845900 | 51 | 52 |
| Os01g0862800 | 53 | 54 |
| Os01g0928600 | 55 | 56 |
| Os01g0937500 | 57 | 58 |
| Os02g0111600 | 59 | 60 |
| Os02g0159800 | 61 | 62 |
| Os02g0252400 | 63 | 64 |
| Os02g0503900 | 65 | 66 |
| Os02g0555300 | 67 | 68 |
| Os02g0562600 | 69 | 70 |
| Os02g0569400 | 71 | 72 |
| Os02g0570700 | 73 | 74 |
| Os02g0579000 | 75 | 76 |
| Os02g0601500 | 77 | 78 |
| Os02g0606200 | 79 | 80 |
| Os02g0736200 | 81 | 82 |
| Os02g0759400 | 83 | 84 |
| Os02g0782500 | 85 | 86 |
| Os02g0808800 | 87 | 88 |
| Os03g0130100 | 89 | 90 |
| Os03g0132900 | 91 | 92 |
| Os03g0138700 | 93 | 94 |
| Os03g0183500 | 95 | 96 |
| Os03g0267000 | 97 | 98 |
| Os03g0269300 | 99 | 100 |
| Os03g0327100 | 101 | 102 |
| Os03g0421000 | 103 | 104 |
| Os03g0432100 | 105 | 106 |
| Os03g0575200 | 107 | 108 |
| Os03g0584400 | 109 | 110 |
| Os03g0762000 | 111 | 112 |
| Os04g0104900 | 113 | 114 |
| Os04g0107600 | 115 | 116 |
| Os04g0206500 | 117 | 118 |
| Os0490206600 | 119 | 120 |
| Os04g0301500 | 121 | 122 |
| Os04g0320700 | 123 | 124 |
| Os04g0339800 | 125 | 126 |
| Os04g0437000 | 127 | 128 |
| Os04g0460600 | 129 | 130 |
| Os04g0464100 | 131 | 132 |
| Os04g0469000 | 133 | 134 |
| Os04g0508500 | 135 | 136 |
| Os04g0565200 | 137 | 138 |
| Os04g0581100 | 139 | 140 |
| Os04g0583900 | 141 | 142 |
| Os04g0612700 | 143 | 144 |
| Os04g0632600 | 145 | 146 |
| Os04g0664500 | 147 | 148 |
| Os0490675400 | 149 | 150 |
| Os05g0247800 | 151 | 152 |
| Os05g0298700 | 153 | 154 |
| Os05g0318600 | 155 | 156 |
| Os05g0376600 | 157 | 158 |
| Os05g0404700 | 159 | 160 |
| Os05g0469600 | 161 | 162 |
| Os05g0481900 | 163 | 164 |
| Os05g0542500 | 165 | 166 |
| Os05g0555600 | 167 | 168 |
| Os06g0104900 | 169 | 170 |
| Os06g0215900 | 171 | 172 |
| Os06g0317200 | 173 | 174 |
| Os06g0318600 | 175 | 176 |
| Os06g0486400 | 177 | 178 |
| Os06g0548200 | 179 | 180 |
| Os06g0568600 | 181 | 182 |
| Os06g0671600 | 183 | 184 |
| Os06g0675600 | 185 | 186 |
| Os06g0728700 | 187 | 188 |
| Os07g0129300 | 189 | 190 |
| Os07g0129700 | 191 | 192 |
| Os07g0129800 | 193 | 194 |
| Os07g0130400 | 195 | 196 |
| Os07g0154100 | 197 | 198 |
| Os0790171100 | 199 | 200 |
| Os07g0182000 | 201 | 202 |
| Os07g0190000 | 203 | 204 |
| Os07g0251900 | 205 | 206 |
| Os07g0262800 | 207 | 208 |
| Os07g0410700 | 209 | 210 |
| Os07g0486000 | 211 | 212 |
| Os07g0490100 | 213 | 214 |
| Os07g0558100 | 215 | 216 |
| Os07g0663700 | 217 | 218 |
| Os07g0674800 | 219 | 220 |
| Os07g0683200 | 221 | 222 |
| Os07g0684800 | 223 | 224 |
| Os07g0689600 | 225 | 226 |
| Os08g0115800 | 227 | 228 |
| Os0890133700 | 229 | 230 |
| Os08g0203400 | 231 | 232 |
| Os08g0367000 | 233 | 234 |
| Os08g0474000 | 235 | 236 |
| Os08g0501000 | 237 | 238 |
| Os08g0518800 | 239 | 240 |
| Os08g0518900 | 241 | 242 |
| Os08g0519300 | 243 | 244 |
| Os09g0417600 | 245 | 246 |
| Os09g0417800 | 247 | 248 |
| Os09g0445700 | 249 | 250 |
| Os09g0448200 | 251 | 252 |
| Os09g0457900 | 253 | 254 |
| Os09g0497900 | 255 | 256 |
| Os09g0507300 | 257 | 258 |
| Os09g0517200 | 259 | 260 |
| Os09g0551500 | 261 | 262 |
| Os09g0555500 | 263 | 264 |
| Os10g0134500 | 265 | 266 |
| Os10g0136500 | 267 | 268 |
| Os10g0151100 | 269 | 270 |
| Os10g0174800 | 271 | 272 |
| Os10g0204400 | 273 | 274 |
| Os10g0418100 | 275 | 276 |
| Os10g0451700 | 277 | 278 |
| Os10g0498300 | 279 | 280 |
| Os10g0505000 | 281 | 282 |
| Os10g0569600 | 283 | 284 |
| Os11g0118000 | 285 | 286 |
| Os11g0154500 | 287 | 288 |
| Os11g0282700 | 289 | 290 |
| Os11g0453900 | 291 | 292 |
| Os11g0514500 | 293 | 294 |
| Os11g0539600 | 295 | 296 |
| Os11g0567800 | 297 | 298 |
| Os11g0687100 | 299 | 300 |
| Os11g0701000 | 301 | 302 |
| Os11g0701100 | 303 | 304 |
| Os11g0701200 | 305 | 306 |
| Os11g0701400 | 307 | 308 |
| Os11g0701500 | 309 | 310 |
| Os11g0701800 | 311 | 312 |
| Os11g0701900 | 313 | 314 |
| Os11g0702200 | 315 | 316 |
| Os11g0702400 | 317 | 318 |
| Os12g0123700 | 319 | 320 |
| Os12g0197100 | 321 | 322 |
| Os12g0227500 | 323 | 324 |
| Os12g0431100 | 325 | 326 |
| Os12g0485900 | 327 | 328 |
| Os12g0597800 | 329 | 330 |
| Os12g0610600 | 331 | 332 |
| A. cepa_CF438306 | 333 | 334 |
| Os11g03300.1 | 335 | 336 |
| Z. mays_ZM07MC20223_BFb0131A04@20172 | 337 | 338 |
| O. sativa TraitMillCDS ; CDS 1 | 339 | 340 |
| O. sativa TraitMillCDS ; CDS 2 | 341 | 342 |
| Z. mays_ZM07MStraceDB_BFb0239J01.f_1120947912@54470 | 343 | 344 |
| A. thaliana_AT3G04070.1 | 345 | 346 |
| A. thaliana_AT3G04070.2 | 347 | 348 |
| G. max_GM06MC20707_59724361@20295 | 349 | 350 |
| M. truncatula_AC145753_12.5 | 351 | 352 |
| P. trichocarpa_scaff_XIII.531 | 353 | 354 |
| P. trichocarpa_scaff_XIX.359 | 355 | 356 |
| A. thaliana_AT1G69490.1 | 357 | 358 |
| G. max_GM06MC02339_48986826@2322 | 359 | 360 |
| G. max_GM06MC00030_47169159@30 | 361 | 362 |
| M. truncatula_AC140030_19.5 | 363 | 364 |
| G. max_GM06MC38096_sv19a12@37209 | 365 | 366 |
| M. truncatula_CT573505_5.4 | 367 | 368 |
| P. trichocarpa_scaff_VIII.823 | 369 | 370 |
| S. lycopersicum_TC204003 | 371 | 372 |
| S. lycopersicum_TC200098 | 373 | 374 |
| M. truncatula_AC128638_20.4 | 375 | 376 |
| M. truncatula_AC150891_8.5 | 377 | 378 |
| OSNAC1 | 379 | 380 |
| OsNAC6 | 381 | 382 |
| OsNAC5 | 383 | 384 |
| Os12g0597800 | 385 | 386 |
| Os01g0264000 | 387 | 388 |
| Os11g0694100 | 389 | 390 |
| Os02g0530800 | 391 | 392 |
| Os05g0469800 | 393 | 394 |

[0340] In some instances, related sequences have tentatively been assembled and publicly disclosed by research institutions, such as The Institute for Genomic Research (TIGR; beginning with TA). The Eukaryotic Gene Orthologs (EGO) database may be used to identify such related sequences, either by keyword search or by using the BLAST algorithm with the nucleic acid sequence or polypeptide sequence of interest. On other instances, special nucleic acid sequence databases have been created for particular organisms, such as by the Joint Genome Institute. Further, access to proprietary databases, has allowed the identification of novel nucleic acid and polypeptide sequences.

### Example 2

### Alignment of Sequences Related to the Polypeptide Sequences Used in the Methods of the Invention

### 2.1. IAA2-Like Polypeptides

[0341] Alignment of polypeptide sequences was performed using the AlignX programme from the Vector NTI (Invitrogen), which is based on the ClustalW 2.0 algorithm for progressive alignment (Thompson et al. (1997) Nucleic Acids Res 25:4876-4882; Chenna et al. (2003). Nucleic Acids Res 31:3497-3500); Alignment was performed with standard settings: gap opening penalty 10, gap extension penalty: 0.2. Minor manual editing was done to further optimise the alignment. The IAA2-like polypeptides are aligned in FIG. 1.

[0342] Highly conserved amino acid residues are indicated in the consensus sequence.

### 2.2. NAC10-Like Polypeptides

[0343] Alignment of polypeptide sequences as shown in FIG. 4 was performed using the ClustalW 2.0 algorithm of progressive alignment (Thompson et al. (1997) Nucleic Acids Res 25:4876-4882; Chenna et al. (2003). Nucleic Acids Res 31:3497-3500) with standard setting (slow alignment, similarity matrix: Gonnet, gap opening penalty 10, gap extension penalty: 0.2). Minor manual editing was done to further optimise the alignment. This alignment can be used for determining conserved signature sequences of about 5 to 10 amino acids in length. Preferably the conserved regions of the proteins are used, recognisable by the asterisks (identical residues), the colons (highly conserved substitutions) and the dots (conserved substitutions).

[0344] A phylogenetic tree of NAC10-like polypeptides (FIG. 3) was constructed using ClustalW as described in the legend.

### Example 3

### Calculation of Global Percentage Identity Between Polypeptide Sequences Useful in Performing the Methods of the Invention

### 3.1. IAA2-Like Polypeptides

[0345] Global percentages of similarity and identity between full length polypeptide sequences useful in performing the methods of the invention were determined using one of the methods available in the art, the MatGAT (Matrix Global Alignment Tool) software (BMC Bioinformatics. 2003 4:29. MatGAT: an application that generates similarity/identity matrices using protein or DNA sequences. Campanella J J, Bitincka L, Smalley J; software hosted by Ledion Bitincka). MatGAT software generates similarity/identity matrices for DNA or protein sequences without needing pre-alignment of the data. The program performs a series of pair-wise alignments using the Myers and Miller global alignment algorithm (with a gap opening penalty of 12, and a gap extension penalty of 2), calculates similarity and identity using for example Blosum 62 (for polypeptides), and then places the results in a distance matrix.

Parameters that May be Used in the Comparison:
[0346] Scoring matrix: Blosum62
[0347] First Gap: 12
[0348] Extending gap: 2

### 3.2. NAC10-Like Polypeptides

[0349] Global percentages of similarity and identity between full length polypeptide sequences useful in performing the methods of the invention were determined using one of the methods available in the art, the MatGAT (Matrix Global Alignment Tool) software (BMC Bioinformatics. 2003 4:29. MatGAT: an application that generates similarity/identity matrices using protein or DNA sequences. Campanella J J, Bitincka L, Smalley J; software hosted by Ledion Bitincka). MatGAT software generates similarity/identity matrices for DNA or protein sequences without needing pre-alignment of the data. The program performs a series of pair-wise alignments using the Myers and Miller global alignment algorithm (with a gap opening penalty of 12, and a gap extension penalty of 2), calculates similarity and identity using for example Blosum 62 (for polypeptides), and then places the results in a distance matrix. Sequence similarity is shown in the bottom half of the dividing line and sequence identity is shown in the top half of the diagonal dividing line.

[0350] Parameters used in the comparison were: Blosum62 (Scoring matrix), 12 (First Gap penalty), 2 (Extending gap penalty).

[0351] Results of the software analysis are shown in Table B1 for the global similarity and identity over the full length of the polypeptide sequences. Percentage identity is given above the diagonal and percentage similarity is given below the diagonal.

[0352] The percentage identity between the NAC10-like polypeptide sequences useful in performing the methods of the invention can be as low as 30% sequence identity compared to SEQ ID NO: 28.

TABLE B1
MatGAT results for global similarity and identity over the full length of the polypeptide sequences.

| | | 1 | 2 | 3 | 4 | 5 | 6 | 7 | 8 | 9 | 10 | 11 | 12 | 13 |
|---|---|---|---|---|---|---|---|---|---|---|---|---|---|---|
| 1. | OsNAC10_SEQID2 | | 34.9 | 99.0 | 92.0 | 47.8 | 39.1 | 40.3 | 30.7 | 38.9 | 38.0 | 39.1 | 41.5 | 41.2 |
| 2. | Ac_CF438306 | 44.0 | | 35.1 | 34.8 | 29.4 | 35.8 | 36.9 | 51.7 | 41.4 | 39.8 | 39.9 | 38.4 | 39.7 |
| 3. | Os11g03300 | 99.0 | 44.2 | | 91.0 | 47.0 | 39.1 | 40.3 | 30.6 | 38.9 | 37.4 | 37.9 | 41.1 | 41.3 |
| 4. | Os12g0123700 | 95.9 | 43.8 | 94.9 | | 48.3 | 40.0 | 40.7 | 30.8 | 39.4 | 40.5 | 41.0 | 42.4 | 43.1 |
| 5. | Zm_ZM07MC20223 | 58.3 | 37.3 | 57.5 | 59.4 | | 38.8 | 38.8 | 27.3 | 35.9 | 35.6 | 35.6 | 34.9 | 34.5 |
| 6. | Os_CDS_20741_Os_NAM_CREST | 53.5 | 44.8 | 55.4 | 53.7 | 50.1 | | 97.0 | 36.5 | 51.7 | 38.4 | 39.1 | 40.5 | 39.3 |
| 7. | OS_CDS_21636_CREST_control | 57.4 | 46.2 | 57.1 | 56.7 | 49.1 | 97.0 | | 37.6 | 53.2 | 38.6 | 39.2 | 41.6 | 39.9 |
| 8. | Zm_ZM07MStraceDB | 38.4 | 63.9 | 38.5 | 39.2 | 33.1 | 41.3 | 42.6 | | 43.6 | 35.2 | 35.8 | 34.8 | 33.9 |
| 9. | Os07g0683200 | 53.5 | 51.5 | 52.7 | 53.9 | 45.9 | 60.6 | 62.8 | 51.2 | | 40.6 | 39.9 | 42.5 | 39.6 |
| 10. | AT3G04070.1 | 54.5 | 48.7 | 54.8 | 56.5 | 48.0 | 53.0 | 53.3 | 41.8 | 54.9 | | 95.5 | 49.7 | 49.6 |
| 11. | AT3G04070.2 | 54.0 | 49.0 | 53.7 | 56.0 | 47.6 | 52.2 | 52.6 | 43.1 | 56.6 | 95.5 | | 51.1 | 51.0 |
| 12. | Gm_GM06MC20707 | 54.7 | 47.3 | 54.8 | 55.5 | 47.6 | 52.2 | 54.6 | 41.0 | 53.8 | 65.5 | 65.8 | | 75.9 |
| 13. | Mt_AC145753_12.5 | 54.0 | 47.9 | 54.0 | 54.5 | 45.9 | 52.7 | 53.6 | 41.5 | 55.3 | 66.0 | 67.9 | 85.8 | |
| 14. | Pt_scaff_XIII.531 | 52.4 | 45.9 | 52.2 | 55.5 | 48.4 | 50.7 | 52.6 | 41.0 | 53.5 | 68.2 | 67.1 | 72.8 | 70.4 |
| 15. | Pt_scaff_XIX.359 | 56.5 | 47.1 | 54.5 | 57.5 | 49.3 | 53.7 | 54.6 | 40.6 | 54.0 | 68.1 | 65.4 | 72.8 | 68.9 |
| 16. | AT1G69490.1 | 46.5 | 64.2 | 46.8 | 46.8 | 38.7 | 45.3 | 46.4 | 53.0 | 52.6 | 50.7 | 52.2 | 49.3 | 52.9 |
| 17. | Gm_GM06MC02339 | 43.5 | 68.2 | 44.7 | 42.5 | 35.8 | 42.1 | 43.9 | 61.8 | 46.5 | 47.1 | 47.8 | 45.0 | 48.8 |
| 18. | Gm_GM06MC00030 | 47.6 | 58.6 | 47.8 | 47.1 | 40.6 | 47.0 | 46.9 | 51.4 | 51.8 | 51.3 | 52.5 | 51.6 | 53.5 |
| 19. | Mt_AC140030_19.5 | 48.3 | 59.4 | 48.6 | 48.6 | 38.5 | 43.1 | 44.4 | 52.4 | 48.0 | 49.6 | 51.6 | 52.1 | 51.8 |
| 20. | Gm_GM06MC38096 | 48.1 | 59.5 | 48.6 | 48.3 | 41.1 | 47.0 | 49.5 | 49.5 | 50.9 | 52.4 | 54.2 | 51.6 | 52.6 |
| 21. | Mt_CT573505_5.4 | 47.1 | 62.7 | 47.3 | 46.3 | 39.4 | 44.1 | 45.7 | 51.5 | 50.3 | 50.1 | 51.9 | 50.7 | 50.9 |
| 22. | Pt_scaff_VIII.823 | 47.8 | 56.9 | 47.0 | 48.3 | 40.2 | 45.8 | 47.2 | 51.9 | 51.5 | 52.1 | 53.6 | 51.0 | 50.6 |
| 23. | SI_TC204003 | 48.3 | 60.3 | 48.8 | 49.6 | 42.9 | 46.3 | 47.7 | 50.4 | 52.9 | 52.1 | 53.6 | 51.0 | 53.5 |
| 24. | SI_TC200098 | 48.8 | 60.0 | 49.1 | 48.3 | 39.4 | 47.8 | 49.0 | 53.1 | 51.8 | 50.7 | 52.5 | 53.6 | 53.2 |
| 25. | Mt_AC128638_20.4 | 49.6 | 51.8 | 50.6 | 49.9 | 42.1 | 49.5 | 50.3 | 43.6 | 53.2 | 57.1 | 58.9 | 52.7 | 56.8 |

| | | 14 | 15 | 16 | 17 | 18 | 19 | 20 | 21 | 22 | 23 | 24 | 25 |
|---|---|---|---|---|---|---|---|---|---|---|---|---|---|
| 1. | OsNAC10_SEQID2 | 40.1 | 41.6 | 37.3 | 36.3 | 36.7 | 40.7 | 38.6 | 37.9 | 39.8 | 38.4 | 38.4 | 36.9 |
| 2. | Ac_CF438306 | 38.6 | 39.2 | 47.7 | 52.2 | 46.9 | 46.6 | 45.3 | 48.2 | 45.2 | 47.1 | 46.3 | 39.0 |
| 3. | Os11g03300 | 39.5 | 40.5 | 37.5 | 36.1 | 37.1 | 40.4 | 38.3 | 37.5 | 39.2 | 39.5 | 38.2 | 36.8 |
| 4. | Os12g0123700 | 42.0 | 42.4 | 38.1 | 35.6 | 36.6 | 40.2 | 37.3 | 37.7 | 40.6 | 40.7 | 37.9 | 37.2 |
| 5. | Zm_ZM07MC20223 | 35.8 | 36.7 | 31.6 | 30.1 | 32.0 | 31.4 | 32.6 | 31.6 | 32.4 | 34.9 | 29.7 | 31.4 |
| 6. | Os_CDS_20741_Os_NAM_CREST | 40.0 | 41.5 | 36.7 | 34.3 | 36.3 | 33.9 | 35.1 | 35.6 | 37.0 | 34.9 | 37.0 | 35.4 |
| 7. | OS_CDS_21636_CREST_control | 40.4 | 42.1 | 37.8 | 35.4 | 36.4 | 34.2 | 36.2 | 36.5 | 37.6 | 36.0 | 37.9 | 35.9 |
| 8. | Zm_ZM07MStraceDB | 33.9 | 34.0 | 41.4 | 45.7 | 38.3 | 39.5 | 37.6 | 38.3 | 39.9 | 38.2 | 39.6 | 31.3 |
| 9. | Os07g0683200 | 41.8 | 41.4 | 41.5 | 37.2 | 40.4 | 37.2 | 39.8 | 39.0 | 41.6 | 41.1 | 39.2 | 37.5 |
| 10. | AT3G04070.1 | 53.4 | 53.1 | 39.0 | 37.3 | 39.6 | 39.8 | 39.8 | 38.7 | 39.3 | 40.9 | 38.4 | 39.7 |
| 11. | AT3G04070.2 | 53.6 | 53.5 | 39.9 | 37.9 | 39.9 | 41.1 | 40.5 | 39.7 | 40.2 | 42.0 | 39.5 | 41.0 |
| 12. | Gm_GM06MC20707 | 59.9 | 60.4 | 38.4 | 38.0 | 41.0 | 40.6 | 40.2 | 38.7 | 40.5 | 41.8 | 41.0 | 39.5 |
| 13. | Mt_AC145753_12.5 | 58.1 | 58.2 | 42.3 | 40.3 | 42.0 | 41.1 | 41.3 | 41.6 | 41.8 | 42.3 | 42.7 | 41.2 |
| 14. | Pt_scaff_XIII.531 | | 79.8 | 38.3 | 35.9 | 39.8 | 39.8 | 39.7 | 38.9 | 38.6 | 40.1 | 38.9 | 40.3 |
| 15. | Pt_scaff_XIX.359 | 87.2 | | 40.3 | 36.9 | 37.8 | 41.3 | 40.4 | 39.6 | 40.9 | 42.7 | 40.9 | 38.0 |
| 16. | AT1G69490.1 | 50.5 | 49.9 | | 59.1 | 55.7 | 55.2 | 55.3 | 56.5 | 58.6 | 52.9 | 56.3 | 39.3 |
| 17. | Gm_GM06MC02339 | 45.1 | 45.0 | 69.4 | | 78.9 | 66.2 | 64.1 | 65.3 | 58.3 | 53.7 | 56.0 | 39.3 |
| 18. | Gm_GM06MC00030 | 50.8 | 49.9 | 71.4 | 80.7 | | 73.0 | 72.8 | 65.8 | 62.0 | 54.9 | 55.6 | 41.8 |
| 19. | Mt_AC140030_19.5 | 51.4 | 49.9 | 69.0 | 73.1 | 81.4 | | 66.3 | 66.1 | 58.8 | 55.8 | 53.7 | 42.7 |
| 20. | Gm_GM06MC38096 | 51.4 | 51.8 | 70.6 | 74.2 | 83.9 | 81.4 | | 77.1 | 65.7 | 55.8 | 59.7 | 40.5 |
| 21. | Mt_CT573505_5.4 | 48.9 | 49.6 | 71.6 | 76.9 | 76.8 | 78.2 | 85.3 | | 60.2 | 54.8 | 60.8 | 40.9 |
| 22. | Pt_scaff_VIII.823 | 50.3 | 51.2 | 70.7 | 68.2 | 74.9 | 71.0 | 78.4 | 74.6 | | 61.7 | 60.8 | 41.8 |
| 23. | SI_TC204003 | 50.5 | 53.1 | 69.9 | 66.3 | 72.0 | 71.6 | 69.5 | 70.6 | 74.6 | | 67.4 | 39.9 |
| 24. | SI_TC200098 | 52.7 | 51.5 | 70.5 | 67.6 | 70.7 | 72.0 | 74.9 | 73.5 | 72.8 | 77.0 | | 39.6 |
| 25. | Mt_AC128638_20.4 | 54.3 | 52.9 | 53.4 | 50.9 | 56.4 | 53.7 | 53.0 | 53.7 | 54.3 | 53.0 | 54.9 | |

### Example 4

### Identification of Domains Comprised in Polypeptide Sequences Useful in Performing the Methods of the Invention

### 4.1. IAA2-Like Polypeptides

[0353] The presence of conserved protein domains in SEQ ID NO: 2 was determined by searching the pfam database. Pfam is a large collection of multiple sequence alignments and hidden Markov models covering many common protein domains and families. Pfam is hosted at the Sanger Institute server in the United Kingdom.

[0354] The results of the search of the Pfam with the query sequence as represented by SEQ ID NO: 2 are presented in Table C1.

TABLE C1
Pfam search results (major accession numbers) of the
polypeptide sequence as represented by SEQ ID NO: 2.

| | | | Sequence (amino acid | | | |
|---|---|---|---|---|---|---|
| | | | coordinates of the domain | | | |
| | | | in the query sequence) | | | Alignment |
| | Description | Entry type | Start | End | E-value | mode |
| Pfam-A | AUX/IAA family | Family | 49 | 335 | 3E−13 | Is |

[0355] The Alignment mode used for PF2309 is the so called “Is”. Parameters used in the model are given in Table C2.

TABLE C2
Is model: hmmbuild-F HMM_Is SEED hmmcalibrate --cpu 1 --seed
0 HMM_Is

Is

| Parameter | Sequence | Domain |
|---|---|---|
| Gathering cut- | −83 | −83 |
| off | | |
| Trusted cut-off | −82 | −82 |
| Noise cut-off | −83.5 | −83.5 |

### 4.2. NAC10-Like Polypeptides

[0356] The Integrated Resource of Protein Families, Domains and Sites (InterPro) database is an integrated interface for the commonly used signature databases for text- and sequence-based searches. The InterPro database combines these databases, which use different methodologies and varying degrees of biological information about well-characterized proteins to derive protein signatures. Collaborating databases include SWISS-PROT, PROSITE, TrEMBL, PRINTS, ProDom and Pfam, Smart and TIGRFAMs. Pfam is a large collection of multiple sequence alignments and hidden Markov models covering many common protein domains and families. Pfam is hosted at the Sanger Institute server in the United Kingdom. Interpro is hosted at the European Bioinformatics Institute in the United Kingdom.

[0357] The results of the InterPro scan of the polypeptide sequence as represented by SEQ ID NO: 28 are presented in Table C3.

TABLE C3
InterPro scan results (major accession numbers) of the polypeptide
sequence as represented by SEQ ID NO: 28.

| | | | Amino acid |
|---|---|---|---|
| | Accession | | coordinates |
| Database | number | Accession name | on SEQ ID NO: 28 |
| PFAM | PF02365 | NAM | 11-139 |
| PROFILE | PS51005 | NAC | 11-172 |
| SUPERFAMILY | SSF101941 | NAM | 7-173 |

### Example 5

### Topology Prediction of the Polypeptide Sequences Useful in Performing the Methods of the Invention

### 5.1. IAA2-Like Polypeptides

[0358] TargetP 1.1 predicts the subcellular location of eukaryotic proteins. The location assignment is based on the predicted presence of any of the N-terminal pre-sequences: chloroplast transit peptide (cTP), mitochondrial targeting peptide (mTP) or secretory pathway signal peptide (SP). Scores on which the final prediction is based are not really probabilities, and they do not necessarily add to one. However, the location with the highest score is the most likely according to TargetP, and the relationship between the scores (the reliability class) may be an indication of how certain the prediction is. The reliability class (RC) ranges from 1 to 5, where 1 indicates the strongest prediction. TargetP is maintained at the server of the Technical University of Denmark.

[0359] For the sequences predicted to contain an N-terminal presequence a potential cleavage site can also be predicted.

[0360] A number of parameters are selected, such as organism group (non-plant or plant), cutoff sets (none, predefined set of cutoffs, or user-specified set of cutoffs), and the calculation of prediction of cleavage sites (yes or no).

[0361] Many other algorithms can be used to perform such analyses, including:
[0362] ChloroP 1.1 hosted on the server of the Technical University of Denmark;
[0363] Protein Prowler Subcellular Localisation Predictor version 1.2 hosted on the server of the Institute for Molecular Bioscience, University of Queensland, Brisbane, Australia;
[0364] PENCE Proteome Analyst PA-GOSUB 2.5 hosted on the server of the University of Alberta, Edmonton, Alberta, Canada;
[0365] TMHMM, hosted on the server of the Technical University of Denmark
[0366] PSORT (URL: psort.org)
[0367] PLOC (Park and Kanehisa, Bioinformatics, 19, 1656-1663, 2003).

### 5.2. NAC10-Like Polypeptides

[0368] TargetP 1.1 predicts the subcellular location of eukaryotic proteins. The location assignment is based on the predicted presence of any of the N-terminal pre-sequences: chloroplast transit peptide (cTP), mitochondrial targeting peptide (mTP) or secretory pathway signal peptide (SP). Scores on which the final prediction is based are not really probabilities, and they do not necessarily add to one. However, the location with the highest score is the most likely according to TargetP, and the relationship between the scores (the reliability class) may be an indication of how certain the prediction is. The reliability class (RC) ranges from 1 to 5, where 1 indicates the strongest prediction. TargetP is maintained at the server of the Technical University of Denmark.

[0369] For the sequences predicted to contain an N-terminal presequence a potential cleavage site can also be predicted.

[0370] A number of parameters were selected, such as organism group (non-plant or plant), cutoff sets (none, predefined set of cutoffs, or user-specified set of cutoffs), and the calculation of prediction of cleavage sites (yes or no).

[0371] The results of TargetP 1.1 analysis of the polypeptide sequence as represented by SEQ ID NO: 28 are presented Table D1. The “plant” organism group has been selected, no cutoffs defined, and the predicted length of the transit peptide requested. The subcellular localization of the polypeptide sequence as represented by SEQ ID NO: 28 may be the cytoplasm or nucleus, no transit peptide is predicted.

TABLE D1
TargetP 1.1 analysis of the polypeptide
sequence as represented by SEQ ID NO: 28.

| Name | Len | cTP | mTP | SP | other | Loc | RC | TPlen |
|---|---|---|---|---|---|---|---|---|
| SEQ ID NO: 28 | 393 | 0.056 | 0.204 | 0.167 | 0.848 | — | 2 | — |
| cutoff | | 0.000 | 0.000 | 0.000 | 0.000 | | | |

Abbreviations: Len, Length; cTP, Chloroplastic transit peptide; mTP, Mitochondrial transit peptide, SP, Secretory pathway signal peptide, other, Other subcellular targeting, Loc, Predicted Location; RC, Reliability class; TPlen, Predicted transit peptide length.

[0372] Many other algorithms can be used to perform such analyses, including:
[0373] ChloroP 1.1 hosted on the server of the Technical University of Denmark;
[0374] Protein Prowler Subcellular Localisation Predictor version 1.2 hosted on the server of the Institute for Molecular Bioscience, University of Queensland, Brisbane, Australia;
[0375] PENCE Proteome Analyst PA-GOSUB 2.5 hosted on the server of the University of Alberta, Edmonton, Alberta, Canada;
[0376] TMHMM, hosted on the server of the Technical University of Denmark
[0377] PSORT (URL: psort.org)
[0378] PLOC (Park and Kanehisa, Bioinformatics, 19, 1656-1663, 2003).

### Example 6

### Cloning of the Nucleic Acid Sequence Used in the Methods of the Invention and Rice Transformation

### 6.1. IAA2-Like Polypeptides

[0379] The nucleic acid having the sequence of SEQ ID NO: 1 was isolated using routine molecular biology techniques from rice and cloned into an entry vector of the Gateway technology (Invitrogen).

[0380] The entry clone comprising SEQ ID NO: 1 was then used in an LR reaction with a destination vector used for Oryza sativa transformation. This vector contained as functional elements within the T-DNA borders: a plant selectable marker; a screenable marker expression cassette; and a Gateway cassette intended for LR in vivo recombination with the nucleic acid sequence of interest already cloned in the entry clone. A rice GOS2 promoter (SEQ ID NO: 26) for constitutive specific expression was located upstream of this Gateway cassette.

[0381] After the LR recombination step, the resulting expression vector pGOS2::IAA2-like (FIG. 2) was transformed into Agrobacterium strain LBA4044 according to methods well known in the art.

### 6.2. NAC10-Like Polypeptides

### In One Experiment, the Following Transformation Method was Used:

[0382] The coding region of OsNAC10 was amplified from rice total RNA using an RT-PCR system (Promega, WI), according to the manufacturer's instructions. Primer pairs were as follows:

(primer A, SEQ ID NO: 384)

| | |
|---|---|
| Forward: | (5′-ATGCCGAGCAGCGGCGGCGC-3′) |

(primer B, SEQ ID NO: 385)

| | |
|---|---|
| Reverse: | (5-CTACTGCATCTGCAGATGAT-3′). |

[0383] To enable the overexpression of the OsNAC10 gene in rice, isolated cDNA was linked to the GOS2 promoter for constitutive expression (de Pater et al., 1992), and the RCc3 promoter for root specific expression (Xu et al., 1995) respectively, using the Gateway system (Invitrogen, Carlsbad, Calif.). Plasmids were introduced into Agrobacterium tumefaciens LBA4404 by triparental mating and embryogenic (Oryza sativa cv Nipponbare) calli from mature seeds were transformed as previously described (Jang et al., 1999).

[0384] To enable the overexpression of the OsNAC10 genes in rice, their full-length cDNAs were isolated and linked to the RCc3 promoter (Xu et al., 1995) for root-specific expression, and the GOS2 promoter (de Pater et al., 1992) for constitutive expression, generating the constructs RCc3::OsNAC10 and GOS2::OsNAC10. These constructs were then introduced into rice by Agrobacterium-mediated transformation (Hiei et al., 1994), which yielded 15 to 20 independent transgenic lines per construct. Transgenic T1-4 seeds were collected and three independent T4 homozygous lines of both RCc3::OsNAC10 and GOS2::OsNAC10 plants were selected for further analysis. All of the transgenic lines grew normally with no stunting. The transcript levels of OsNAC10 in the RCc3::OsNAC10 and GOS2::OsNAC10 plants were determined by RNA-gel blot analysis. For this purpose, total RNAs were extracted from leaf and root tissues of 14-day-old seedlings grown under normal growth conditions (FIG. 4). The OsNAC10 was clearly detectable in all the transgenic lines but not detected in the nontransgenic (NT) controls. Transgene was expressed at high levels in leaves and roots of the GOS2::OsNAC10 plants and in roots of the RCc3::OsNAC10 plants, but not in leaves of the latter, verifying the constitutive and root-specific nature of the promoters.

In Another Experiment, Plasmids were Constructed and Plants were Transformed as Follows:

[0385] The nucleic acid sequence used in the methods of the invention was amplified by PCR using as template a custom-made Oryza sativa seedlings cDNA library (in pCMV Sport 6.0; Invitrogen, Paisley, UK). PCR was performed using Hifi Taq DNA polymerase in standard conditions, using 200 ng of template in a 50 μl PCR mix. The primers used were prm08754 (SEQ ID NO: 386; sense, start codon in bold): 5′-ggggacaagtttgtacaaaaaagcaggcttaaacaatg ccgagcagcg-3′ and prm08755 (SEQ ID NO: 387; reverse, complementary): 5′-ggggaccactttg tacaagaaagctgggtctactgcatctgcagatga-3′, which include the AttB sites for Gateway recombination. The amplified PCR fragment was purified also using standard methods. The first step of the Gateway procedure, the BP reaction, was then performed, during which the PCR fragment recombined in vivo with the pDONR201 plasmid to produce, according to the Gateway terminology, an “entry clone”, pNAC10. Plasmid pDONR201 is purchased from Invitrogen, as part of the Gateway® technology.

[0386] The entry clone comprising SEQ ID NO: 27 was then used in an LR reaction with a destination vector used for Oryza sativa transformation. This vector contained as functional elements within the T-DNA borders: a plant selectable marker; a screenable marker expression cassette; and a Gateway cassette intended for LR in vivo recombination with the nucleic acid sequence of interest already cloned in the entry clone. A rice RCc3 promoter (SEQ ID NO: 383) for root-specific expression was located upstream of this Gateway cassette.

[0387] After the LR recombination step, the resulting expression vector pRCc3::NAC10 is transformed into Agrobacterium strain LBA4044 according to methods well known in the art.

### Example 8

### Plant Transformation of Other Crops

[0388] The Agrobacterium containing the expression vector was used to transform Oryza sativa plants. Mature dry seeds of the rice japonica cultivar Nipponbare were dehusked. Sterilization was carried out by incubating for one minute in 70% ethanol, followed by 30 minutes in 0.2% HgCl2, followed by a 6 times 15 minutes wash with sterile distilled water. The sterile seeds were then germinated on a medium containing 2,4-D (callus induction medium). After incubation in the dark for four weeks, embryogenic, scutellum-derived calli were excised and propagated on the same medium. After two weeks, the calli were multiplied or propagated by subculture on the same medium for another 2 weeks. Embryogenic callus pieces were sub-cultured on fresh medium 3 days before co-cultivation (to boost cell division activity).

[0389] Agrobacterium strain LBA4404 containing the expression vector was used for co-cultivation. Agrobacterium was inoculated on AB medium with the appropriate antibiotics and cultured for 3 days at 28° C. The bacteria were then collected and suspended in liquid co-cultivation medium to a density (OD600) of about 1. The suspension was then transferred to a Petri dish and the calli immersed in the suspension for 15 minutes. The callus tissues were then blotted dry on a filter paper and transferred to solidified, co-cultivation medium and incubated for 3 days in the dark at 25° C. Co-cultivated calli were grown on 2,4-D-containing medium for 4 weeks in the dark at 28° C. in the presence of a selection agent. During this period, rapidly growing resistant callus islands developed. After transfer of this material to a regeneration medium and incubation in the light, the embryogenic potential was released and shoots developed in the next four to five weeks. Shoots were excised from the calli and incubated for 2 to 3 weeks on an auxin-containing medium from which they were transferred to soil. Hardened shoots were grown under high humidity and short days in a greenhouse.

[0390] Approximately 35 independent TO rice transformants were generated for one construct. The primary transformants were transferred from a tissue culture chamber to a greenhouse. After a quantitative PCR analysis to verify copy number of the T-DNA insert, only single copy transgenic plants that exhibit tolerance to the selection agent were kept for harvest of T1 seed. Seeds were then harvested three to five months after transplanting. The method yielded single locus transformants at a rate of over 50% (Aldemita and Hodges 1996, Chan et al. 1993, Hiei et al. 1994).

### Example 8

### Transformation of Other Crops

### Corn Transformation

[0391] Transformation of maize (Zea mays) is performed with a modification of the method described by Ishida et al. (1996) Nature Biotech 14(6): 745-50. Transformation is genotype-dependent in corn and only specific genotypes are amenable to transformation and regeneration. The inbred line A188 (University of Minnesota) or hybrids with A188 as a parent are good sources of donor material for transformation, but other genotypes can be used successfully as well. Ears are harvested from corn plant approximately 11 days after pollination (DAP) when the length of the immature embryo is about 1 to 1.2 mm. Immature embryos are cocultivated with Agrobacterium tumefaciens containing the expression vector, and transgenic plants are recovered through organogenesis. Excised embryos are grown on callus induction medium, then maize regeneration medium, containing the selection agent (for example imidazolinone but various selection markers can be used). The Petri plates are incubated in the light at 25° C. for 2-3 weeks, or until shoots develop. The green shoots are transferred from each embryo to maize rooting medium and incubated at 25° C. for 2-3 weeks, until roots develop. The rooted shoots are transplanted to soil in the greenhouse. T1 seeds are produced from plants that exhibit tolerance to the selection agent and that contain a single copy of the T-DNA insert.

### Wheat Transformation

[0392] Transformation of wheat is performed with the method described by Ishida et al. (1996) Nature Biotech 14(6): 745-50. The cultivar Bobwhite (available from CIMMYT, Mexico) is commonly used in transformation. Immature embryos are co-cultivated with Agrobacterium tumefaciens containing the expression vector, and transgenic plants are recovered through organogenesis. After incubation with Agrobacterium, the embryos are grown in vitro on callus induction medium, then regeneration medium, containing the selection agent (for example imidazolinone but various selection markers can be used). The Petri plates are incubated in the light at 25° C. for 2-3 weeks, or until shoots develop. The green shoots are transferred from each embryo to rooting medium and incubated at 25° C. for 2-3 weeks, until roots develop. The rooted shoots are transplanted to soil in the greenhouse. T1 seeds are produced from plants that exhibit tolerance to the selection agent and that contain a single copy of the T-DNA insert.

### Soybean Transformation

[0393] Soybean is transformed according to a modification of the method described in the Texas A&M U.S. Pat. No. 5,164,310. Several commercial soybean varieties are amenable to transformation by this method. The cultivar Jack (available from the Illinois Seed foundation) is commonly used for transformation. Soybean seeds are sterilised for in vitro sowing. The hypocotyl, the radicle and one cotyledon are excised from seven-day old young seedlings. The epicotyl and the remaining cotyledon are further grown to develop axillary nodes. These axillary nodes are excised and incubated with Agrobacterium tumefaciens containing the expression vector. After the cocultivation treatment, the explants are washed and transferred to selection media. Regenerated shoots are excised and placed on a shoot elongation medium. Shoots no longer than 1 cm are placed on rooting medium until roots develop. The rooted shoots are transplanted to soil in the greenhouse. T1 seeds are produced from plants that exhibit tolerance to the selection agent and that contain a single copy of the T-DNA insert.

### Rapeseed/Canola Transformation

[0394] Cotyledonary petioles and hypocotyls of 5-6 day old young seedling are used as explants for tissue culture and transformed according to Babic et al. (1998, Plant Cell Rep 17: 183-188). The commercial cultivar Westar (Agriculture Canada) is the standard variety used for transformation, but other varieties can also be used. Canola seeds are surface-sterilized for in vitro sowing. The cotyledon petiole explants with the cotyledon attached are excised from the in vitro seedlings, and inoculated with Agrobacterium (containing the expression vector) by dipping the cut end of the petiole explant into the bacterial suspension. The explants are then cultured for 2 days on MSBAP-3 medium containing 3 mg/l BAP, 3% sucrose, 0.7% Phytagar at 23° C., 16 hr light. After two days of co-cultivation with Agrobacterium, the petiole explants are transferred to MSBAP-3 medium containing 3 mg/l BAP, cefotaxime, carbenicillin, or timentin (300 mg/l) for 7 days, and then cultured on MSBAP-3 medium with cefotaxime, carbenicillin, or timentin and selection agent until shoot regeneration. When the shoots are 5-10 mm in length, they are cut and transferred to shoot elongation medium (MSBAP-0.5, containing 0.5 mg/l BAP). Shoots of about 2 cm in length are transferred to the rooting medium (MS0) for root induction. The rooted shoots are transplanted to soil in the greenhouse. T1 seeds are produced from plants that exhibit tolerance to the selection agent and that contain a single copy of the T-DNA insert.

### Alfalfa Transformation

[0395] A regenerating clone of alfalfa (Medicago sativa) is transformed using the method of (McKersie et al., 1999 Plant Physiol 119: 839-847). Regeneration and transformation of alfalfa is genotype dependent and therefore a regenerating plant is required. Methods to obtain regenerating plants have been described. For example, these can be selected from the cultivar Rangelander (Agriculture Canada) or any other commercial alfalfa variety as described by Brown DCW and A Atanassov (1985. Plant Cell Tissue Organ Culture 4: 111-112). Alternatively, the RA3 variety (University of Wisconsin) has been selected for use in tissue culture (Walker et al., 1978 Am J Bot 65:654-659). Petiole explants are cocultivated with an overnight culture of Agrobacterium tumefaciens C58C1 pMP90 (McKersie et al., 1999 Plant Physiol 119: 839-847) or LBA4404 containing the expression vector. The explants are cocultivated for 3 d in the dark on SH induction medium containing 288 mg/L Pro, 53 mg/L thioproline, 4.35 g/L K2SO4, and 100 μm acetosyringinone. The explants are washed in half-strength Murashige-Skoog medium (Murashige and Skoog, 1962) and plated on the same SH induction medium without acetosyringinone but with a suitable selection agent and suitable antibiotic to inhibit Agrobacterium growth. After several weeks, somatic embryos are transferred to BOi2Y development medium containing no growth regulators, no antibiotics, and 50 g/L sucrose. Somatic embryos are subsequently germinated on half-strength Murashige-Skoog medium. Rooted seedlings are transplanted into pots and grown in a greenhouse. T1 seeds are produced from plants that exhibit tolerance to the selection agent and that contain a single copy of the T-DNA insert.

### Cotton Transformation

[0396] Cotton is transformed using Agrobacterium tumefaciens according to the method described in U.S. Pat. No. 5,159,135. Cotton seeds are surface sterilised in 3% sodium hypochlorite solution during 20 minutes and washed in distilled water with 500 μg/ml cefotaxime. The seeds are then transferred to SH-medium with 50 μg/ml benomyl for germination. Hypocotyls of 4 to 6 days old seedlings are removed, cut into 0.5 cm pieces and are placed on 0.8% agar. An Agrobacterium suspension (approx. 108 cells per ml, diluted from an overnight culture transformed with the gene of interest and suitable selection markers) is used for inoculation of the hypocotyl explants. After 3 days at room temperature and lighting, the tissues are transferred to a solid medium (1.6 g/l Gelrite) with Murashige and Skoog salts with B5 vitamins (Gamborg et al., Exp. Cell Res. 50:151-158 (1968)), 0.1 mg/l 2,4-D, 0.1 mg/l 6-furfurylaminopurine and 750 μg/ml MgCL2, and with 50 to 100 μg/ml cefotaxime and 400-500 μg/ml carbenicillin to kill residual bacteria. Individual cell lines are isolated after two to three months (with subcultures every four to six weeks) and are further cultivated on selective medium for tissue amplification (30° C., 16 hr photoperiod). Transformed tissues are subsequently further cultivated on non-selective medium during 2 to 3 months to give rise to somatic embryos. Healthy looking embryos of at least 4 mm length are transferred to tubes with SH medium in fine vermiculite, supplemented with 0.1 mg/l indole acetic acid, 6 furfurylaminopurine and gibberellic acid. The embryos are cultivated at 30° C. with a photoperiod of 16 hrs, and plantlets at the 2 to 3 leaf stage are transferred to pots with vermiculite and nutrients. The plants are hardened and subsequently moved to the greenhouse for further cultivation.

### Example 9

### Phenotypic Evaluation Procedure

### 9.1. IAA2-Like Polypeptides

### 9.1.1. Evaluation Setup

[0397] Approximately 35 independent T0 rice transformants were generated. The primary transformants were transferred from a tissue culture chamber to a greenhouse for growing and harvest of T1 seed. Events, of which the T1 progeny segregated 3:1 for presence/absence of the transgene, were retained. For each of these events, approximately 10 T1 seedlings containing the transgene (hetero- and homo-zygotes) and approximately 10 T1 seedlings lacking the transgene (nullizygotes) were selected by monitoring visual marker expression. The transgenic plants and the corresponding nullizygotes were grown side-by-side at random positions. Greenhouse conditions were of shorts days (12 hours light), 28° C. in the light and 22° C. in the dark, and a relative humidity of 70%. Plants grown under non-stress conditions were watered at regular intervals to ensure that water and nutrients were not limiting and to satisfy plant needs to complete growth and development. From the stage of sowing until the stage of maturity the plants were passed several times through a digital imaging cabinet. At each time point digital images (2048×1536 pixels, 16 million colours) were taken of each plant from at least 6 different angles.

### Drought Screen

[0398] Plants from T2 seeds are grown in potting soil under normal conditions until they approached the heading stage. They are then transferred to a “dry” section where irrigation is withheld. Humidity probes are inserted in randomly chosen pots to monitor the soil water content (SWC). When SWC goes below certain thresholds, the plants are automatically re-watered continuously until a normal level is reached again. The plants are then re-transferred again to normal conditions. The rest of the cultivation (plant maturation, seed harvest) is the same as for plants not grown under abiotic stress conditions. Growth and yield parameters are recorded as detailed for growth under normal conditions.

### Nitrogen Use Efficiency Screen

[0399] Rice plants from T2 seeds are grown in potting soil under normal conditions except for the nutrient solution. The pots are watered from transplantation to maturation with a specific nutrient solution containing reduced N nitrogen (N) content, usually between 7 to 8 times less. The rest of the cultivation (plant maturation, seed harvest) is the same as for plants not grown under abiotic stress. Growth and yield parameters are recorded as detailed for growth under normal conditions.

### Salt Stress Screen

[0400] Plants are grown on a substrate made of coco fibers and argex (3 to 1 ratio). A normal nutrient solution is used during the first two weeks after transplanting the plantlets in the greenhouse. After the first two weeks, 25 mM of salt (NaCl) is added to the nutrient solution, until the plants are harvested. Seed-related parameters are then measured.

### 9.1.2. Statistical Analysis: F Test

[0401] A two factor ANOVA (analysis of variants) was used as a statistical model for the overall evaluation of plant phenotypic characteristics. An F test was carried out on all the parameters measured of all the plants of all the events transformed with the gene of the present invention. The F test was carried out to check for an effect of the gene over all the transformation events and to verify for an overall effect of the gene, also known as a global gene effect. The threshold for significance for a true global gene effect was set at a 5% probability level for the F test. A significant F test value points to a gene effect, meaning that it is not only the mere presence or position of the gene that is causing the differences in phenotype.

### 9.1.3. Parameters Measured

### Biomass-Related Parameter Measurement

[0402] From the stage of sowing until the stage of maturity the plants were passed several times through a digital imaging cabinet. At each time point digital images (2048×1536 pixels, 16 million colours) were taken of each plant from at least 6 different angles.

[0403] The plant aboveground area (or leafy biomass) was determined by counting the total number of pixels on the digital images from aboveground plant parts discriminated from the background. This value was averaged for the pictures taken on the same time point from the different angles and was converted to a physical surface value expressed in square mm by calibration. Experiments show that the aboveground plant area measured this way correlates with the biomass of plant parts above ground. The above ground area is the area measured at the time point at which the plant had reached its maximal leafy biomass. The early vigour is the plant (seedling) aboveground area three weeks post-germination. Increase in root biomass is expressed as an increase in total root biomass (measured as maximum biomass of roots observed during the lifespan of a plant); or as an increase in the root/shoot index (measured as the ratio between root mass and shoot mass in the period of active growth of root and shoot).

[0404] Early vigour was determined by counting the total number of pixels from aboveground plant parts discriminated from the background. This value was averaged for the pictures taken on the same time point from different angles and was converted to a physical surface value expressed in square mm by calibration. The results described below are for plants three weeks post-germination.

### Seed-Related Parameter Measurements

[0405] The mature primary panicles were harvested, counted, bagged, barcode-labelled and then dried for three days in an oven at 37° C. The panicles were then threshed and all the seeds were collected and counted. The filled husks were separated from the empty ones using an air-blowing device. The empty husks were discarded and the remaining fraction was counted again. The filled husks were weighed on an analytical balance. The number of filled seeds was determined by counting the number of filled husks that remained after the separation step. The total seed yield was measured by weighing all filled husks harvested from a plant. Total seed number per plant was measured by counting the number of husks harvested from a plant. Thousand Kernel Weight (TKW) is extrapolated from the number of filled seeds counted and their total weight. The Harvest Index (HI) in the present invention is defined as the ratio between the total seed yield and the above ground area (mm²), multiplied by a factor 10⁶. The total number of flowers per panicle as defined in the present invention is the ratio between the total number of seeds and the number of mature primary panicles. The seed fill rate as defined in the present invention is the proportion (expressed as a %) of the number of filled seeds over the total number of seeds (or florets).

### 9.2. NAC10-Like Polypeptides

[0406] In a first set of experiments, the following tests were performed:

### Drought Treatments at the Vegetative Stage

[0407] Transgenic and nontransgenic (NT) rice (Oryza sativa cv Nipponbare) seeds were germinated in half-strength MS solid medium in a growth chamber in the dark at 28° C. for 4 days, transplanted into soil and then grown in a greenhouse (16-h-light/8-h-dark cycles) at 28-30° C. Eighteen seedlings from each transgenic and nontransgenic line were grown in pots (3×3×5 cm; 1 plant per pot) for 4 weeks before undertaking the drought-stress experiments. To induce drought stress, 4-week-old transgenic and NT seedlings were withheld from watering for 3 days followed by 7 days of watering. The numbers of plants that survived or continued to grow were then scored.

### Chlorophyll Fluorescence Under Conditions of Drought, High-Salinity and Low Temperature

[0408] Transgenic and nontransgenic rice (Oryza sativa cv Nipponbare) seeds were germinated and grown in half-strength MS solid medium for 14 days in a growth chamber (16-h-light of 150 μmol m⁻² s⁻¹/8-h-dark cycles at 28° C.). The green portions of approximately 10 seedlings were cut using a scissors prior to stress treatments in vitro. To induce low-temperature stress, the seedlings were incubated at 4° C. in water for up to 6 h under continuous 150 μmol m⁻² s⁻¹ light. For high-salinity stress treatments, they were incubated in 400 mM NaCl for 2 h at 28° C. under continuous 150 μmol m⁻² s⁻¹ and to simulate drought stress they were air-dried for 2 h at 28° C. under continuous 150 μmol m⁻² s⁻¹ light. The Fv/Fm values were then measured as previously described (Oh et al., 2005b).

### Drought Treatments and Grain Yield Analysis of Rice Plants Grown in the Field

[0409] To evaluate yield components of transgenic plants under normal field conditions, three independent T4 homozygous lines of the RCc3::OsNAC10 and GOS2::OsNAC10 plants, together with nontransgenic (NT) controls were transplanted to a paddy field at the Rural Development Administration, Suwon, Korea. A completely randomized design was employed with two replicates, each consisting of 4 plots of 5 m2. At 25 d after sowing, the seedlings were randomly transplanted within a 15×30 cm distance. Fertilizer was applied at 70N/40P/70K kg ha-1 after the last paddling and 45 d after transplantation. Yield parameters were scored for 10 plants per plot, and 20 plants per line.

[0410] To evaluate yield components of transgenic plants under drought field conditions, three independent T4 homozygous lines of the RCc3:OsNAC10 and GOS2:OsNAC10 plants, and NT controls were transplanted to a removable rain-off shelter with a 1 meter deep container filled with natural paddy soil and located at Myongji University, Yongin, Korea. A completely randomized design, transplanting distance and use of fertilizer was employed as described above for normal field conditions. Drought stress was applied at the panicle heading stage (from 10-d before heading to 20-d after heading) by flowing water through a drain at the bottom of the container. To prevent plants from dying, we irrigated twice when the plant leaves rolled during drought stress. After exposure to drought stress conditions, the polyvinyl roofs were removed and plants were irrigated until harvesting.

[0411] When the plants grown under normal and drought conditions had reached maturity and the grains had ripened, they were harvested and threshed by hand (separation of seeds from the vegetative parts). The unfilled and filled grains were taken apart, independently counted using a Countmate MC1000H (Prince Ltd, Korea), and weighed. The following agronomic traits were scored: flowering date, panicle length, number of tillers, number of panicles, spikelets per panicle, filling rate (%), total grain weight (g), and 1,000 grain weight (g). The results from three independent lines were separately analyzed by one way ANOVA and compared with those of the NT controls. The ANOVA was used to reject the null hypothesis of equal means of transgenic lines and NT controls (P<0.05). The SPSS version 16.0 was used to perform statistical analysis.

[0412] In another set, the following experiments were performed:

### 9.2.1. Evaluation Setup

[0413] Approximately 35 independent T0 rice transformants were generated. The primary transformants were transferred from a tissue culture chamber to a greenhouse for growing and harvest of T1 seed. Six events, of which the T1 progeny segregated 3:1 for presence/absence of the transgene, were retained. For each of these events, approximately 10 T1 seedlings containing the transgene (hetero- and homo-zygotes) and approximately 10 T1 seedlings lacking the transgene (nullizygotes) were selected by monitoring visual marker expression. The transgenic plants and the corresponding nullizygotes were grown side-by-side at random positions. Greenhouse conditions were of shorts days (12 hours light), 28° C. in the light and 22° C. in the dark, and a relative humidity of 70%. Plants grown under non-stress conditions were watered at regular intervals to ensure that water and nutrients were not limiting and to satisfy plant needs to complete growth and development.

[0414] Four T1 events are further evaluated in the T2 generation following the same evaluation procedure as for the T1 generation but with more individuals per event.

[0415] From the stage of sowing until the stage of maturity the plants were passed several times through a digital imaging cabinet. At each time point digital images (2048×1536 pixels, 16 million colours) were taken of each plant from at least 6 different angles.

### Drought Screen

[0416] Plants from T2 seeds were grown in potting soil under normal conditions until they approached the heading stage. They were then transferred to a “dry” section where irrigation was withheld. Humidity probes were inserted in randomly chosen pots to monitor the soil water content (SWC). When SWC goes below certain thresholds, the plants were automatically re-watered continuously until a normal level was reached again. The plants were then re-transferred again to normal conditions. The rest of the cultivation (plant maturation, seed harvest) was the same as for plants not grown under abiotic stress conditions. Growth and yield parameters were recorded as detailed for growth under normal conditions.

### Nitrogen Use Efficiency Screen

[0417] Rice plants from T2 seeds are grown in potting soil under normal conditions except for the nutrient solution. The pots are watered from transplantation to maturation with a specific nutrient solution containing reduced N nitrogen (N) content, usually between 7 to 8 times less. The rest of the cultivation (plant maturation, seed harvest) is the same as for plants not grown under abiotic stress. Growth and yield parameters are recorded as detailed for growth under normal conditions.

### Salt Stress Screen

[0418] Plants are grown on a substrate made of coco fibers and argex (3 to 1 ratio). A normal nutrient solution is used during the first two weeks after transplanting the plantlets in the greenhouse. After the first two weeks, 25 mM of salt (NaCl) is added to the nutrient solution, until the plants are harvested. Seed-related parameters are then measured.

### 9.2.2. Statistical Analysis: F Test

[0419] A two factor ANOVA (analysis of variants) was used as a statistical model for the overall evaluation of plant phenotypic characteristics. An F test was carried out on all the parameters measured of all the plants of all the events transformed with the gene of the present invention. The F test was carried out to check for an effect of the gene over all the transformation events and to verify for an overall effect of the gene, also known as a global gene effect. The threshold for significance for a true global gene effect was set at a 5% probability level for the F test. A significant F test value points to a gene effect, meaning that it is not only the mere presence or position of the gene that is causing the differences in phenotype.

[0420] When two experiments with overlapping events are carried out, a combined analysis is performed. This is useful to check consistency of the effects over the two experiments, and if this is the case, to accumulate evidence from both experiments in order to increase confidence in the conclusion. The method used is a mixed-model approach that takes into account the multilevel structure of the data (i.e. experiment—event—segregants). P values are obtained by comparing likelihood ratio test to chi square distributions.

### 9.2.3. Parameters Measured

### Biomass-Related Parameter Measurement

[0421] From the stage of sowing until the stage of maturity the plants were passed several times through a digital imaging cabinet. At each time point digital images (2048×1536 pixels, 16 million colours) were taken of each plant from at least 6 different angles.

[0422] The plant aboveground area (or leafy biomass) was determined by counting the total number of pixels on the digital images from aboveground plant parts discriminated from the background. This value was averaged for the pictures taken on the same time point from the different angles and was converted to a physical surface value expressed in square mm by calibration. Experiments show that the aboveground plant area measured this way correlates with the biomass of plant parts above ground. The above ground area is the area measured at the time point at which the plant had reached its maximal leafy biomass. The early vigour is the plant (seedling) aboveground area three weeks post-germination. Increase in root biomass is expressed as an increase in total root biomass (measured as maximum biomass of roots observed during the lifespan of a plant); or as an increase in the root/shoot index (measured as the ratio between root mass and shoot mass in the period of active growth of root and shoot).

[0423] Early vigour was determined by counting the total number of pixels from aboveground plant parts discriminated from the background. This value was averaged for the pictures taken on the same time point from different angles and was converted to a physical surface value expressed in square mm by calibration. The results described below are for plants three weeks post-germination.

### Seed-Related Parameter Measurements

[0424] The mature primary panicles were harvested, counted, bagged, barcode-labelled and then dried for three days in an oven at 37° C. The panicles were then threshed and all the seeds were collected and counted. The filled husks were separated from the empty ones using an air-blowing device. The empty husks were discarded and the remaining fraction was counted again. The filled husks were weighed on an analytical balance. The number of filled seeds was determined by counting the number of filled husks that remained after the separation step. The total seed yield was measured by weighing all filled husks harvested from a plant. Total seed number per plant was measured by counting the number of husks harvested from a plant. Thousand Kernel Weight (TKW) is extrapolated from the number of filled seeds counted and their total weight. The Harvest Index (HI) in the present invention is defined as the ratio between the total seed yield and the above ground area (mm²), multiplied by a factor 10⁶. The total number of flowers per panicle as defined in the present invention is the ratio between the total number of seeds and the number of mature primary panicles. The seed fill rate as defined in the present invention is the proportion (expressed as a %) of the number of filled seeds over the total number of seeds (or florets).

### Examples 10

### Results of the Phenotypic Evaluation of the Transgenic Plants

### 10.1. IAA2-Like Polypeptides

[0425] The results of the evaluation of transgenic rice plants in the T2 generation and expressing a nucleic acid comprising the longest Open Reading Frame in SEQ ID NO: 1 under non-stress conditions are presented below. See previous Examples for details on the generations of the transgenic plants.

[0426] The results of the evaluation of transgenic rice plants under non-stress conditions are presented below (Table E1). An increase of at least 5% was observed for seed fill rate (fillrate) and harvest index (harvestindex), and of 2.5% for thousand kernel weight (TKW).

TABLE E1

| | Percentage increase in transgenic |
|---|---|
| Yield-related trait | plants compared to control plants |
| fillrate | 16.3 |
| TKW | 3 |
| harvestindex | 11.1 |

### 10.2. NAC10-Like Polypeptides

[0427] Results of the first set of experiments:

### Stress Tolerance of RCc3::OsNAC10 and GOS2::OsNAC10 Plants at the Vegetative Stage

[0428] To investigate whether the overexpression of OsNAC10 correlated with stress tolerance in rice, four-week-old transgenic plants and NT controls were exposed to drought stress (FIG. 5). The NT plants started to show visual symptoms of drought-induced damage, such as leaf rolling and wilting with a concomitant loss of chlorophylls, at an earlier stage than the RCc3::OsNAC10 and GOS2::OsNAC10 plants. The transgenic plants also recovered faster than the NT plants upon re-watering. Consequently, the NT plants remained severely affected by the time at which some of the transgenic lines had partially recovered (FIG. 7). To further verify the stress-tolerance phenotype, we measured the Fv/Fm values of the transgenic and NT control plants, all at the vegetative stage (FIG. 8). The Fv/Fm values represent the maximum photochemical efficiency of PS II in a dark-adapted state (Fv, variable fluorescence; Fm, maximum fluorescence). The Fv/Fm levels were 15 to 30% higher in the RCc3::OsNAC10 and GOS2::OsNAC10 plants than in the NT plants under drought and low temperature conditions. Under moderate salinity conditions, the Fv/Fm levels were 10% higher in both transgenic plants over NT controls whereas, under severe salinity conditions, the levels remained similar to those of NT plants. Hence, our results indicate that the overexpression of OsNAC10 in transgenic rice increases the tolerance of these plants primarily to drought and low temperature stress conditions during the vegetative stage.

### Overexpression of OsNAC10 in Roots Increases Rice Grain Yield Under Drought Conditions

[0429] A phenotypic evaluation of both RCc3::OsNAC10 and NT control plants revealed no major differences in the vegetative growth of the entire plants. To investigate whether the overexpression of OsNAC10 increase grain yield of transgenic rice plants under field conditions, we transplanted three independent T4 homozygous lines of the RCc3::OsNAC10 and nontransgenic (NT) controls, to a paddy field and grew them to maturity. A completely randomized design with two replicates was employed. In the RCc3::OsNAC10 plants under normal field conditions, however, total grain weight was increased by 5-14% compared with the NT controls, which appears to be due to increased number of filled grains (FIG. 9, Table F). These observations prompted us to examine the yield components of the transgenic rice plants grown in the field drought conditions. Three independent lines of the RCc3::OsNAC10 and NT controls were transplanted to a paddy field with a removable rain-off shelter, and exposed to drought stress at the panicle heading stage (from 10-d before heading to 20-d after heading). Statistical analysis of the yield parameters showed that the decrease in grain yield under drought conditions was significantly smaller in the RCc3::OsNAC10 plants than that observed in the NT controls. Specifically, in the drought-treated RCc3:OsNAC10 plants, the number of filled grains was higher than the drought-treated NT plants by 22-47%, which resulted in an increase in the total grain weight by 19-29%, depending on the transgenic line (FIG. 9 and Table G). Overall, our results suggest that the overexpression of OsNAC10 in roots gave a higher drought tolerance of transgenic rice at the reproductive stage, increasing grain yield significantly.

TABLE F
Agronomic Traits of the RCc3: OsNAC10 and GOS2: OsNAC10
Transgenic Rice Plants under Normal Field Conditions.

| | Culm | Panicle | No. of | No. of | No. of | | No. of filled | | |
|---|---|---|---|---|---|---|---|---|---|
| | length | length | Panicles | Spikelets | Spikelets | Fill | Spikelets | Total grain | 1000 grain |
| Construct | (cm) | (cm) | (/hill) | (/panicle) | (/hill) | rate (%) | (/hill) | weight (g) | weight (g) |
| NT | 71.73 | 19.38 | 11.50 | 94.67 | 1084.15 | 89.91 | 975.90 | 24.33 | 22.42 |
| RCc3: OsNAC10-11 | 72.03 | 18.70 | 12.65* | 99.21* | 1253.60* | 91.07 | 1136.35* | 26.32* | 21.14* |
| % Δ | 0.42 | −3.48 | 10.0 | 04.80 | 15.63 | 1.28 | 16.44 | 8.16 | −5.69 |
| RCc3:OsNAC10-16 | 79.00* | 19.60 | 12.20 | 98.68 | 1200.20* | 91.84 | 1100.10* | 27.84* | 23.24 |
| % Δ | 10.14 | 1.16 | 6.09 | 4.24 | 10.70 | 2.14 | 12.7 | 314.43 | 3.68 |
| RCc3:OsNAC10-37 | 74.15* | 18.45* | 11.50 | 95.16 | 1092.80 | 92.24 | 1008.55 | 25.62 | 23.45* |
| % Δ | 3.38 | −4.77 | 0.00 | 0.52 | 0.80 | 2.59 | 3.35 | 5.28 | 4.61 |

*The mean difference is significant at the 0.05 level (LSD).

TABLE G
Agronomic Traits of the RCc3: OsNAC10 and GOS2: OsNAC10 Transgenic Rice Plants under Field Drought Conditions.

| | Culm | Panicle | No. of | No. of | No. of total | | No. of filled | | |
|---|---|---|---|---|---|---|---|---|---|
| | length | length | Panicles | Spikelets | spikelets | Filling | spikelets | Total grain- | 1000 grain- |
| Construct | (cm) | (cm) | (/hill) | (/panicle) | (/hill) | rate (%) | (/hill) | weight (g) | weight (g) |
| NT | 54.10 | 19.30 | 10.00 | 82.10 | 820.00 | 71.76 | 588.80 | 12.84 | 21.84 |
| RCc3: OsNAC10-11 | 53.60 | 18.20* | 12.40 | 84.59 | 1041.60* | 82.72* | 869.00* | 16.68* | 19.20* |
| % Δ | −0.92 | −5.70 | 24.0 | 03.04 | 27.02 | 15.27 | 47.59 | 29.91 | −12.11 |
| RCc3: OsNAC10-16 | 61.20* | 18.20* | 11.00 | 88.00 | 947.80 | 76.14 | 718.20 | 15.38 | 21.43 |
| % Δ | 13.12 | −5.70 | 10.00 | 7.19 | 15.59 | 6.10 | 21.98 | 19.78 | −1.89 |
| RCc3: OsNAC10-37 | 52.00 | 19.20 | 12.20 | 80.29 | 979.60 | 79.49 | 773.40* | 15.421 | 9.95* |
| % Δ | −3.88 | −0.52 | 22.00 | −2.20 | 19.46 | 10.78 | 31.35 | 20.09 | −8.66 |
| NT | 54.10 | 19.30 | 10.00 | 82.10 | 820.00 | 71.76 | 588.80 | 12.84 | 21.84 |
| GOS2: OsNAC10-22 | 58.10 | 18.50 | 10.60 | 73.01 | 774.80 | 53.99 | 431.20 | 8.62 | 20.17* |
| % Δ | 7.39 | −4.15 | 6.00 | −11.07 | −5.51 | −24.77 | −26.77 | −32.87 | −7.68 |
| GOS2: OsNAC10-37 | 65.70* | 18.90 | 14.60* | 82.66 | 1186.80* | 53.78 | 624.00 | 12.84 | 20.50* |
| % Δ | 21.44 | −2.07 | 46.00 | 0.68 | 44.73 | −25.05 | 5.98 | 0.00 | −6.17 |
| GOS2: OsNAC10-38 | 64.70* | 18.30 | 16.40* | 76.10 | 1219.00* | 48.14* | 594.40 | 12.54 | 20.97 |
| % Δ | 19.59 | −5.18 | 64.00 | −7.30 | 48.66 | −32.92 | 0.95 | −2.34 | −4.02 |

*The mean difference is significant at the 0.05 level (LSD).

[0430] In the second set of experiments, an increase in seed yield was observed for plants transformed with SEQ ID NO: 28 under control of the RCc3 promoters. Three out of six tested lines had an increased fill rate, with an overall increase of 14.6% (p-value 0.0304).

### Example 11

### Transcriptional Activation Test in Yeast

### 11.1. NAC10-Like Polypeptides

[0431] To examine the transcriptional activity of OsNAC10 and C-terminal deletion mutants thereof a yeast transcriptional activation assay was performed. Full-length and C-terminal deletion mutants of OsNAC10 were amplified by PCR and inserted into the pGBKT7 vector (Clontech, Palo Alto, Calif.) generating a fusion with the GAL4 DNA-binding domain (BD), as described previously (Jeong et al., 2009). All the constructs were then verified by DNA sequence analysis. The constructs were introduced into Saccharomyces cerevisiae strain AH109 (Clontech) and transformed cells were grown on SD/-Trp medium for 3 days. Transformed colonies were plated onto SD/-Trp and SD/-Trp/-His medium to test for transcriptional activation.

[0432] GAL4 DNA binding domain-OsNAC10 fusion proteins were expressed in yeast cells, which were assayed for their ability to activate transcription from the GAL4 binding sequence. As shown in FIG. 10, OsNAC10 and OsNAC10 (Δ323-460) promoted yeast growth in the absence of histidine that was abolished upon a further deletion of C-terminal region to the position 244, demonstrating that OsNAC10 functions as a transcriptional activator.

### Example 12

### OsNAC10 is Induced by Stress

### 12.1. NAC10-Like Polypeptides

### Rice 3′-Tiling Microarray Analysis

[0433] Expression profiling was conducted using the Rice 3″-Tiling Microarray, manufactured by NimbleGen Inc. (http://www.nimblegen.com), which contains 27,448 genes deposited at the IRGSP, RAP1 database (http://rapdb.lab.nig.ac.jp). Further information on this microarray including statistical analysis can be found at http://www.ggbio.com (GreenGene Biotech). Among the genes on the microarray, 20,507 are from representative RAP1 sequences with cDNA/EST supports and 6,941 genes have been predicted without cDNA/EST supports. Ten 60-nt long probes were designed from each gene starting at 60 by ahead of the stop codon and with 10 by shifts in position so that 10 probes covered 150 by within the 3′ region of the gene. In total, 270,000 probes were designed in this way (average size, 60-nt) to have Tm values of between 75° C. and 85° C. Random GC probes (38,000) were used to monitor the hybridization efficiency and fiducial markers at the four corners (225) were included to assist with overlaying of the grid on the image. To identify stress-inducible NAC genes in rice, total RNA (100 μg) was prepared from 14-d-old rice (Oryza sativa cv Nipponbare) leaves of plants subjected to drought, high-salinity, ABA, and low-temperature stress conditions. For the high salinity and ABA treatments, the 14-d-old seedlings were transferred to a nutrient solution containing 400 mM NaCl or 100 μM ABA for 2 h in the greenhouse under continuous light of approximately 1000 μmol m-2 s-1. For drought treatment, 14-d-old seedlings were air-dried for 2 h under continuous light of approximately 1000 μmol m-2 s-1. For low temperature treatments, 14-d-old seedlings were exposed at 4° C. in a cold chamber for 6 h under continuous light of 150 μmol m-2 s-1. For identification of genes up-regulated in RCc3:OsNAC10, GOS2:OsNAC10 plants, total RNA (100 μg) was prepared from root tissues of 14-d-old transgenic and nontransgenic rice (Oryza sativa cv Nipponbare) seedlings grown under normal growth conditions. The mRNA was purified using the Qiagen oligotex column (Qiagen, Valencia, Calif.), according to the manufacturer's instructions. For normalization, data were processed with cubic alpine normalization using quartiles to adjust signal variation between chips, and with Robust Multi-Chip Analysis using a median polish algorithm implemented in NimbleScan (Workman et al., 2002; Irizarry et al., 2003). To assess the reproducibility of the microarray analysis, we repeated the experiments three times with independently prepared total RNAs and analyzed statistically of each data set using one-way ANOVA.

RT-PCR and qPCR Analysis

[0434] Total RNA was prepared as previously reported (Oh et al., 2008). For the analysis of genes by RT-PCR, a cDNA synthesis system (Invitrogen, Carlsbad, Calif.) was used according to the manufacturer's instructions. PCR products were amplified using primers designed with Primer Designer 4 software (Sci-ed Software, Durham, N.C.). RT-PCR was carried out using the primer pairs at a final concentration of 10 μM each and 2 μL (equivalent to 5 ng total RNA) of cDNA as the template. PCR was performed at 95° C. for 10 min, followed by 25 to 29 cycles of at 94° C. for 30 s, 57° C. for 30 s and 68° C. for 1 min. Amplified products were resolved on a 2% agarose gel. To validate our RT-PCR results, we repeated each experiment twice with independently prepared total RNA.

[0435] For quantitative real-time PCR experiments, SuperScript™ III Platinum® One-Step Quantitative RT-PCR system (Invitrogen, Carlsbad, Calif.) was used. For PCR reactions, a master mix of reaction components was prepared, according to the manufacturer's protocol for Platinum® SYBR® Green qPCR SuperMix-UDG (Invitrogen, Carlsbad, Calif.). Thermocycling and fluorescence detection were performed using a Stratagene Mx3000p Real-Time PCR machine (Stratagene, La Jolla, Calif.). PCR was performed at 95° C. for 10 min, followed by 40 cycles of at 94° C. for 30 s, 57° C. for 30 s and 68° C. for 1 min. To validate our qPCR results, we repeated each experiment three times.

### Northern Blot Analysis

[0436] Rice (Oryza sativa cv Nipponbare) seeds were germinated in soil and grown in the glasshouse (16 h light/8 h dark cycle) at 22° C. For high-salinity and ABA treatments, 14-day-old seedlings were transferred to nutrient solution containing 400 mM NaCl or 100 μM ABA for the indicated time course in the glasshouse under continuous light of approximately 1000 μmol/m2/s. For drought treatment, 14-day-old seedlings were excised and air dried for the indicated time course under continuous light of approximately 1000 μmol/m2/s. For low-temperature treatments, 14-day-old seedlings were exposed at 4° C. in a cold chamber for the indicated time course under continuous light of 150 μmol/m2/s. The preparation of total RNA and RNA gel-blot analysis were performed as reported previously (Jang et al., 2002).

[0437] To identify stress-inducible OsNAC genes, we performed expression profiling with the Rice 3′-Tiling microarray (GreenGene Biotech, Yongin, Korea) using RNAs from 14-d-old rice leaves of seedlings subjected to drought, high-salinity, ABA, and low-temperature. When three replicates were averaged and compared with untreated leaves, a total of 18 OsNAC genes were found to be up-regulated by 1.9-fold or greater (P<0.05) by one or more stress conditions (Table H). Phylogenic analysis of the amino acid sequences of 18 OsNACs revealed the presence of 3 subgroups (I to III) (FIG. 11). Comparison of the amino acid sequence spanning the NAC domain identified signature motifs by which these subgroups can be distinguished (FIG. 9). For example, signature motifs Ia-e, IIa-c, and IIIa are specific to subgroups I, II and III, respectively. In addition to sequence similarity, members of each subgroup are closely related in terms of their response to stress. For example, the expression of the genes in subgroup II is not induced by low temperature. One such stress-responsive gene, OsNAC10 (AK069257), representing subgroup I, was functionally characterized in this study.

TABLE H
Rice NAC Transcription Factor Genes Up-regulated Under Stress Conditions.

| | | | | | | | | Low | |
|---|---|---|---|---|---|---|---|---|---|
| Sub | | High Salinity | | Drought | | ABA | | temperature | |
| groups | SEQ ID^{a} | Mean^{b} | P-value^{c} | Mean^{b} | P-value^{c} | Mean^{b} | P-value^{c} | Mean^{b} | P-value^{c} |
| I | OsNAC10 | 16.22 | 0.000 | 14.91 | 0.000 | 13.81 | 0.000 | 0.88 | 0.788 |
| | SNAC1 | 17.31 | 0.000 | 17.18 | 0.000 | 1.90 | 0.013 | 6.96 | 0.000 |
| | OsNAC6 | 5.94 | 0.000 | 5.16 | 0.000 | 4.62 | 0.000 | 2.80 | 0.011 |
| | OsNAC5 | 6.74 | 0.000 | 7.10 | 0.000 | 1.39 | 0.190 | 0.72 | 0.268 |
| | Os07g0683200 | 11.26 | 0.000 | 1.14 | 0.709 | 6.00 | 0.001 | 0.69 | 0.415 |
| | Os01g0816100 | 5.36 | 0.001 | 3.24 | 0.004 | 2.23 | 0.041 | 5.35 | 0.007 |
| | Os12g0123700 | 15.72 | 0.000 | 11.70 | 0.000 | 15.18 | 0.000 | 0.75 | 0.359 |
| II | Os08g0115800 | 1.62 | 0.198 | 2.50 | 0.014 | 1.08 | 0.891 | 1.34 | 0.552 |
| | Os09g0497900 | 2.34 | 0.003 | 2.12 | 0.003 | 1.03 | 0.927 | 0.65 | 0.146 |
| | Os12g0610600 | 1.54 | 0.104 | 0.45 | 0.006 | 4.84 | 0.000 | 0.61 | 0.153 |
| | Os06g0675600 | 2.92 | 0.002 | 1.29 | 0.313 | 3.45 | 0.001 | 0.56 | 0.112 |
| | Os07g0684800 | 17.29 | 0.000 | 11.01 | 0.000 | 8.33 | 0.000 | 0.67 | 0.401 |
| | Os03g0327100 | 6.20 | 0.000 | 9.44 | 0.000 | 2.25 | 0.012 | 1.53 | 0.224 |
| | Os04g0460600 | 0.65 | 0.199 | 0.53 | 0.044 | 2.10 | 0.045 | 1.12 | 0.822 |
| | Os02g0579000 | 2.71 | 0.002 | 1.56 | 0.051 | 2.14 | 0.009 | 1.07 | 0.48 |
| III | Os02g0555300 | 24.78 | 0.000 | 2.69 | 0.008 | 36.66 | 0.000 | 1.06 | 0.923 |
| | Os01g0862800 | 2.77 | 0.010 | 4.51 | 0.001 | 1.20 | 0.700 | 2.77 | 0.046 |
| | Os04g0437000 | 3.40 | 0.001 | 1.39 | 0.149 | 4.16 | 0.000 | 1.04 | 0.926 |

Numbers in boldface indicate up-regulation by more than 1.9-fold (P < 0.05) in plants grown under stress conditions.
^{a}Numbers for full-length cDNA sequences of the corresponding genes.
^{b}Numbers represent the mean of three independent biological replicates.
These microarray data sets can be found at http://www.ncbi.nlm.nih.gov/geo/ (Gene Expression Omnibus, GEO).
^{c}P values were analyzed by one-way ANOVA. Accession numbers: SNAC1, AK067690; OsNAC6, AK068392; OsNAC5, AK102475.

[0438] RT-PCR analysis of the OsNAC10 expression in various tissues at different stages of development revealed that it is predominantly expressed in roots and flowers (panicles) (FIG. 12 A).

[0439] Also a RNA gel-blot analysis was performed using total RNAs from leaf tissues of 14-d-old seedlings exposed to high salinity, drought, ABA and low temperature (FIG. 12 B). Consistent with results from microarray experiments, the expression of OsNAC10 was induced by drought, high salinity and ABA, but not by low temperature.

### Example 13

### Identification of Genes Up-Regulated by Overexpressed OsNAC10

### 13.1. NAC10-Like Polypeptides

[0440] To identify genes that are up-regulated by the overexpression of OsNAC10, we performed expression profiling of GOS2:OsNAC10 and RCc3:OsNAC10 plants in comparison with NT controls under normal growth conditions. Expression profiling with the Rice 3′-Tiling microarray was conducted using RNA samples extracted from 14-d-old roots of these transgenic plants and NT controls, all grown under normal growth conditions. Each data set was obtained from three biological replicates. As listed in Tables I, J and K, statistical analysis of each data set using one-way ANOVA identified 141 genes that are up-regulated by OsNAC10 with 3-fold or greater induction in the transgenic plants than in NT plants (P<0.05). Specifically, a total of 38 genes were commonly activated in both transgenic plants whereas 44 and 59 genes were specific to RCc3:OsNAC10 and GOS2:OsNAC10 plants, respectively. Based on our microarray data shown in Tables G and H, we selected 6 (3 stress-inducible and 3 stress-uninducible) out of 38 common target genes and verified their OsNAC10-dependent expression patterns in roots of transgenic plants under normal growth conditions by real time-PCR (FIG. 13, control). To test whether their expression levels increase further under stress conditions, we measured the transcript levels of the 6 genes in roots and leaves of RCc3:OsNAC10, GOS2:OsNAC10 and NT plants after exposure to drought, high salinity and low temperature conditions (FIG. 13). The transcript levels of OsNAC10 are higher in roots and leaves of GOS2:OsNAC10 plants and in roots of RCc3:OsNAC10 plants over respective NT controls, as expected. In case of three stress-inducible target genes, Cytochrome P450, 2OG-Fe(II) oxygenase and NCED4, their transcript levels were increased at various levels within 2 hours of the stress treatments in NT roots and leaves. The transcript levels were also higher in the transgenic roots under stress conditions in comparison with stress-treated NT plants. Their transcript levels in the transgenic leaves, in contrast, remained similar to that of NT controls, suggesting that expression of the stress-inducible target genes is not OsNAC10-dependent in leaves. Likewise, one stress-uninducible target gene, Potassium transporter KUP3, was OsNAC10-dependent in roots, but not in leaves. Interestingly, expression of two stress-uninducible target genes, Ser/Thr kinase and OPR2, were strictly OsNAC10-dependent in roots and leaves of both transgenic plants. The OsNAC10-dependent expression of the two genes in the transgenic leaves could not be justified because the OsNAC10 transcript level was not increased in RCc3:OsNAC10 leaves. It is noteworthy that the two stress-uninducible target genes were outstanding in fold-increases (over 100-fold) in roots and leaves of both RCc3:OsNAC10 and GOS2:OsNAC10 plants. Overall, these results suggest that both the constitutive and the root-specific overexpression of OsNAC10 gene enhance stress tolerance of transgenic plants at the vegetative stage by activating distinct groups of target genes.

TABLE I
Up-regulated Genes in RCc3:OsNAC10 and GOS2:OsNAC10 plants in Comparison to
Nontransgenic Controls:

| | Loc No^{a} | RCc3::OsNAC10 | | GOS2::OsNAC10 | |
|---|---|---|---|---|---|
| Gene name | (IRGSP) | Mean^{b} | P val^{c} | Mean^{b} | P val^{c} |
| RCc3::OsNAC10 and GOS2::OsNAC10 | | | | | |
| Stress Inducible | | | | | |
| Cytochrome P450 | Os02g0503900 | 9.28 | 0.00 | 4.99 | 0.00 |
| 9-cis-epoxycarotenoid dioxygenase | Os07g0154100 | 7.83 | 0.00 | 4.17 | 0.00 |
| (NCED4) | | | | | |
| Zn-finger protein | Os11g0702400 | 7.71 | 0.00 | 14.94 | 0.00 |
| WRKY family transcription factor | Os09g0417800 | 7.56 | 0.00 | 5.94 | 0.00 |
| Potassium transporter | Os03g0575200 | 6.17 | 0.00 | 3.04 | 0.00 |
| AP2 | Os08g0474000 | 5.79 | 0.00 | 4.11 | 0.00 |
| Mitogen-activated protein kinase | Os04g0339800 | 5.76 | 0.00 | 9.10 | 0.00 |
| kinase | | | | | |
| HLH, helix loop helix domain | Os04g0301500 | 3.76 | 0.00 | 3.67 | 0.00 |
| Cytochrome P450 family protein | Os02g0570700 | 3.46 | 0.00 | 7.89 | 0.00 |
| 2OG-Fe(II) oxygenase | Os04g0581100 | 7.67 | 0.00 | 3.19 | 0.00 |
| Pathogenesis-related protein | Os07g0129300 | 5.22 | 0.00 | 3.01 | 0.00 |
| DUF581 | Os03g0183500 | 3.75 | 0.00 | 3.01 | 0.00 |
| Auxin-responsive SAUR gene family | Os06g0671600 | 3.33 | 0.00 | 5.83 | 0.00 |
| member | | | | | |
| 1-deoxy-D-xylulose 5-phosphate | Os07g0190000 | 3.16 | 0.00 | 5.32 | 0.00 |
| synthase | | | | | |
| Late embryogenesis abundant protein | Os01g0705200 | 3.00 | 0.00 | 6.03 | 0.00 |
| Transcription, Translation, Replication | | | | | |
| Leucine-rich repeat family protein | Os08g0203400 | 8.01 | 0.00 | 3.56 | 0.00 |
| WRKY family transcription factor | Os09g0417600 | 7.84 | 0.00 | 9.28 | 0.00 |
| NAC family protein | Os11g0154500 | 3.89 | 0.00 | 6.64 | 0.00 |
| Zinc finger family protein | Os11g0687100 | 5.14 | 0.00 | 8.97 | 0.00 |
| Cellular processes | | | | | |
| Ste20-like Ser/Thr kinase (Ser/Thr | Os06g0486400 | 37.37 | 0.00 | 47.67 | 0.00 |
| kinase) | | | | | |
| Lectin protein kinase | Os07g0130400 | 6.52 | 0.00 | 7.01 | 0.00 |
| Transmembrane protein kinase | Os07g0251900 | 3.97 | 0.00 | 4.68 | 0.00 |
| Wall-associated kinase | Os02g0111600 | 3.50 | 0.00 | 5.96 | 0.00 |
| Tyrosine kinase | Os10g0174800 | 3.49 | 0.00 | 6.67 | 0.00 |
| Metabolism | | | | | |
| 12-oxophytodienoate reductase | Os06g0215900 | 91.77 | 0.00 | 106.21 | 0.00 |
| (OPR2) | | | | | |
| Acyl-CoA synthetase | Os03g0130100 | 3.87 | 0.00 | 3.42 | 0.00 |
| Multicopper oxidases | Os09g0507300 | 3.16 | 0.00 | 4.22 | 0.00 |
| GCN5-related N-acetyltransferase | Os05g0376600 | 3.12 | 0.00 | 3.05 | 0.00 |
| Potassium transporter KUP3 | Os09g0448200 | 7.76 | 0.00 | 5.73 | 0.00 |
| Heavy metal transporter | Os04g0469000 | 3.86 | 0.00 | 3.53 | 0.00 |
| Detoxification protein | Os04g0464100 | 3.33 | 0.00 | 3.19 | 0.00 |
| Chitinase | Os01g0687400 | 3.08 | 0.00 | 3.49 | 0.00 |
| Glycosyl hydrolase | Os05g0298700 | 3.08 | 0.00 | 3.52 | 0.00 |
| Poorly characterized | | | | | |
| Expressed protein | Os11g0282700 | 50.21 | 0.00 | 78.51 | 0.00 |
| Protein kinase | Os10g0134500 | 4.49 | 0.00 | 6.02 | 0.00 |
| Protein kinase domain containing | Os10g0151100 | 3.19 | 0.00 | 4.48 | 0.00 |
| protein. | | | | | |
| Protein kinase domain containing | Os11g0694100 | 3.13 | 0.00 | 3.64 | 0.00 |
| protein. | | | | | |
| SAM-dependent methyltransferases | Os04g0104900 | 3.09 | 0.00 | 5.43 | 0.00 |

^{a}Numbers for full-length cDNA sequences of the corresponding genes.
^{b}Numbers represent the mean of three independent biological replicates. These microarray data sets can be found at http://www.ncbi.nlm.nih.gov/geo/ (Gene Expression Omnibus, GEO).
^{c}P values were analyzed by one-way ANOVA.

TABLE J
Up-regulated Genes in RCc3::OsNAC10 Plants in Comparison to Nontransgenic Controls:

| | Loc No^{a} | RCc3::OsNAC10 | | GOS2::OsNAC10 | |
|---|---|---|---|---|---|
| Gene name | (IRGSP) | Mean^{b} | P val^{c} | Mean^{b} | P val^{c} |
| RCc3:OsNAC10 | | | | | |
| Glycoside hydrolase | Os05g0247800 | 8.68 | 0.00 | 1.96 | 0.01 |
| AP2 domain containing protein | Os09g0457900 | 10.35 | 0.00 | 1.95 | 0.01 |
| RAP2.6 | | | | | |
| Glycoprotein | Os11g0514500 | 3.73 | 0.00 | 1.92 | 0.00 |
| Calcium-transporting ATPase | Os10g0418100 | 14.13 | 0.00 | 1.91 | 0.00 |
| Arginine decarboxylase | Os04g0107600 | 3.28 | 0.00 | 1.88 | 0.00 |
| Glycine-rich cell wall structural protein | Os10g0451700 | 17.53 | 0.00 | 1.78 | 0.00 |
| NADH dependent Glutamate | Os05g0555600 | 4.26 | 0.00 | 1.56 | 0.01 |
| Synthase | | | | | |
| Rypsin-alpha amylase inhibitor | Os10g0505000 | 5.37 | 0.00 | 1.47 | 0.03 |
| protein. | | | | | |
| L-lactate dehydrogenase | Os06g0104900 | 4.18 | 0.00 | 1.31 | 0.06 |
| FAD linked oxidase | Os06g0548200 | 3.95 | 0.00 | 1.30 | 0.06 |
| Heat shock protein | Os01g0136100 | 3.84 | 0.00 | 1.27 | 0.16 |
| Glycoside hydrolase | Os11g0701200 | 3.39 | 0.00 | 1.26 | 0.43 |
| Leucine rich repeat | Os11g0701800 | 4.28 | 0.00 | 1.21 | 0.40 |
| NAD-dependent mannitol | Os04g0612700 | 9.04 | 0.00 | 1.21 | 0.55 |
| dehydrogenase | | | | | |
| Glycoside hydrolase | Os08g0519300 | 3.41 | 0.00 | 1.15 | 0.39 |
| Cinnamoyl CoA reductase | Os02g0808800 | 13.09 | 0.00 | 1.12 | 0.77 |
| Decarboxylase isozyme | Os05g0469600 | 9.38 | 0.00 | 1.11 | 0.49 |
| H+/oligopeptide symporter | Os03g0138700 | 4.13 | 0.00 | 1.09 | 0.77 |
| Phosphoribosylamine glycine ligase | Os12g0197100 | 3.99 | 0.00 | 1.07 | 0.72 |
| Serine/threonine protein kinase | Os03g0269300 | 5.12 | 0.00 | 1.07 | 0.72 |
| CW-type Zn-finger | Os05g0404700 | 3.65 | 0.00 | 1.06 | 0.78 |
| Chitinase | Os11g0701500 | 4.11 | 0.00 | 1.05 | 0.87 |
| Decarboxylase | Os05g0469600 | 10.74 | 0.00 | 1.04 | 0.81 |
| Chitinase | Os11g070180 | 4.70 | 0.00 | 1.03 | 0.92 |
| Glycine-rich protein | Os06g0317200 | 3.85 | 0.00 | −1.07 | 0.64 |
| Tyrosine kinase | Os09g0551500 | 6.09 | 0.00 | −1.12 | 0.70 |
| Serine palmitoyltransferase | Os09g0551500 | 3.36 | 0.00 | −1.15 | 0.69 |
| Chitinase | Os11g0701400 | 5.08 | 0.00 | −1.15 | 0.65 |
| Agmatine coumaroyltransferase | Os04g0664500 | 3.12 | 0.00 | −1.22 | 0.34 |
| Heat shock protein DnaJ family | Os04g0675400 | 7.76 | 0.00 | −1.24 | 0.38 |
| protein | | | | | |
| AP2 domain containing protein | Os07g0674800 | 3.48 | 0.00 | −1.25 | 0.13 |
| RAP2.2 | | | | | |
| Heat shock protein | Os03g0267000 | 4.14 | 0.00 | −1.28 | 0.10 |
| Glycoside hydrolase | Os11g0701900 | 3.91 | 0.00 | −1.46 | 0.14 |
| Ent-kaurene oxidase | Os06g0568600 | 3.50 | 0.00 | −1.54 | 0.01 |
| Glycoside hydrolase, family 18 | Os08g0518900 | 5.83 | 0.00 | −1.57 | 0.02 |
| protein | | | | | |
| Class III chitinase | Os11g0701100 | 3.42 | 0.00 | −1.63 | 0.03 |
| Chitinase | Os08g0518800 | 3.51 | 0.00 | −1.77 | 0.02 |
| Aspartyl protease | Os01g0937500 | 4.12 | 0.00 | −1.85 | 0.00 |
| Serine/Threonine protein kinases | Os07g0262800 | 3.08 | 0.04 | −2.18 | 0.09 |
| AAA ATPase | Os12g0431100 | 3.56 | 0.00 | −3.32 | 0.00 |
| Class III chitinase | Os11g0701000 | 3.98 | 0.00 | −3.35 | 0.00 |
| phosphate dikinase | Os03g0432100 | 3.43 | 0.00 | −3.69 | 0.00 |
| Phosphoenolpyruvate carboxykinase | Os10g0204400 | 9.92 | 0.00 | −3.82 | 0.00 |
| Glycoside hydrolase | Os11g0702200 | 3.82 | 0.00 | −4.67 | 0.00 |

^{a}Numbers for full-length cDNA sequences of the corresponding genes.
^{b}Numbers represent the mean of three independent biological replicates. These microarray data sets can be found at http://www.ncbi.nlm.nih.gov/geo/ (Gene Expression Omnibus, GEO).
^{c}P values were analyzed by one-way ANOVA.

TABLE K
Up-regulated Genes in GOS2:OsNAC10 Plants in Comparison to Nontransgenic Controls:

| | Loc No^{a} | RCc3::OsNAC10 | | GOS2::OsNAC10 | |
|---|---|---|---|---|---|
| Gene name | (IRGSP) | Mean^{b} | P val^{c} | Mean^{b} | P val^{c} |
| GOS2:OsNAC10 | | | | | |
| MATH domain containing protein | Os10g0429400 | 1.95 | 0.00 | 3.19 | 0.00 |
| Chitinase | Os03g0132900 | 1.94 | 0.00 | 3.30 | 0.00 |
| AP2 | Os07g0410700 | 1.91 | 0.00 | 4.11 | 0.00 |
| Dehydrogenase/reductase | Os07g0663700 | 1.90 | 0.00 | 3.43 | 0.00 |
| ATPase | Os09g0517200 | 1.89 | 0.00 | 3.01 | 0.00 |
| En/Spm-like transposon proteins | Os02g0530800 | 1.86 | 0.25 | 4.16 | 0.01 |
| family protein | | | | | |
| Zn-finger, RING domain containing | Os02g0759400 | 1.84 | 0.00 | 4.83 | 0.00 |
| protein | | | | | |
| AAA-type ATPase-like protein. | Os03g0584400 | 1.84 | 0.01 | 3.74 | 0.00 |
| Serine/threonine-protein kinase | Os04g0632600 | 1.84 | 0.11 | 4.06 | 0.00 |
| receptor | | | | | |
| Mlo-related protein family protein | Os02g0562600 | 1.80 | 0.07 | 3.21 | 0.00 |
| Lipid phosphate phosphatase 2 | Os01g0666000 | 1.72 | 0.00 | 4.17 | 0.00 |
| Protein kinase | Os10g0136500 | 1.69 | 0.03 | 7.18 | 0.00 |
| Phytoene synthase | Os09g0555500 | 1.61 | 0.02 | 4.52 | 0.00 |
| Protein kinase family protein | Os07g0129800 | 1.59 | 0.01 | 3.14 | 0.00 |
| Group 3 LEA (Type I) protein | Os05g0542500 | 1.51 | 0.18 | 3.62 | 0.00 |
| Nicotianamine synthase 9 | Os07g0689600 | 1.49 | 0.02 | 3.06 | 0.00 |
| Glucosyltransferase | Os04g0320700 | 1.46 | 0.06 | 3.12 | 0.00 |
| Zn-finger | Os02g0252400 | 1.44 | 0.04 | 5.61 | 0.00 |
| Cytochrome P450 family protein | Os02g0569400 | 1.42 | 0.05 | 3.34 | 0.00 |
| Small heat stress protein class CIII. | Os02g0782500 | 1.39 | 0.03 | 4.11 | 0.00 |
| UDP-glucosyltransferase family | Os04g0206600 | 1.39 | 0.20 | 7.85 | 0.00 |
| protein | | | | | |
| Dehydrin RAB 16D | Os11g0453900 | 1.39 | 0.06 | 3.23 | 0.00 |
| Myb | Os04g0583900 | 1.39 | 0.20 | 8.57 | 0.00 |
| RNA-directed RNA polymerase | Os02g0736200 | 1.37 | 0.08 | 3.20 | 0.00 |
| Cyclin-like F-box domain containing | Os11g0539600 | 1.35 | 0.15 | 7.36 | 0.00 |
| protein | | | | | |
| Myb | Os04g0508500 | 1.35 | 0.08 | 5.49 | 0.00 |
| RIR1b protein | Os1090569600 | 1.28 | 0.11 | 5.56 | 0.00 |
| Cyclin-like F-box domain containing | Os02g0159800 | 1.28 | 0.10 | 3.42 | 0.00 |
| protein | | | | | |
| HGWP repeat containing protein | Os08g0133700 | 1.28 | 0.64 | 3.14 | 0.02 |
| ATPase | Os12g0485900 | 1.24 | 0.24 | 5.10 | 0.00 |
| Zn-finger | Os01g0264000 | 1.24 | 0.17 | 4.66 | 0.00 |
| En/Spm-like transposon proteins | Os08g0367000 | 1.23 | 0.67 | 3.15 | 0.01 |
| family protein | | | | | |
| Beta-glucosidase aggregating factor. | Os12g0227500 | 1.19 | 0.28 | 3.08 | 0.00 |
| UDP-glucuronosyl and UDP-glucosyl | Os04g0565200 | 1.17 | 0.61 | 3.55 | 0.00 |
| transferase | | | | | |
| Peptidase S41A | Os06g0318600 | 1.16 | 0.41 | 5.01 | 0.00 |
| Myb | Os07g0558100 | 1.12 | 0.48 | 3.06 | 0.00 |
| UDP-glucosyltransferase family | Os04g0206500 | 1.12 | 0.73 | 4.43 | 0.00 |
| protein. | | | | | |
| Serine/threonine protein kinase | Os05g0318600 | 1.05 | 0.86 | 4.05 | 0.00 |
| HAT dimerisation domain containing | Os12g0597800 | 1.01 | 0.97 | 4.92 | 0.00 |
| protein | | | | | |
| Calcium-binding EF-hand domain | Os01g0845900 | 1.01 | 0.97 | 3.86 | 0.00 |
| protein | | | | | |
| Abhydrolase | Os11g0118000 | 1.00 | 0.99 | 3.07 | 0.00 |
| MutS IV domain containing protein | Os07g0486000 | −1.81 | 0.07 | 53.93 | 0.00 |
| Epoxide hydrolase | Os10g0498300 | −1.04 | 0.88 | 42.54 | 0.00 |
| HAT dimerisation domain containing | Os01g0293600 | −1.08 | 0.79 | 12.01 | 0.00 |
| protein | | | | | |
| TPR-like domain containing protein | Os07g0171100 | −1.32 | 0.17 | 9.47 | 0.00 |
| AAA ATPase | Os09g0445700 | −1.03 | 0.88 | 6.82 | 0.00 |
| Cytochrome P450 family protein | Os02g0601500 | −1.19 | 0.30 | 6.34 | 0.00 |
| Casein kinase II alpha subunit | Os03g0762000 | −1.12 | 0.40 | 6.29 | 0.00 |
| Beta-glucosidase. | Os03g0323300 | −1.04 | 0.78 | 5.16 | 0.00 |
| Zn-finger, B-box domain containing | Os02g0606200 | −1.57 | 0.04 | 4.91 | 0.00 |
| protein | | | | | |
| Myb, DNA-binding domain containing | Os06g0728700 | −5.12 | 0.00 | 3.84 | 0.00 |
| protein | | | | | |
| OSH15 protein (Homeobox gene). | Os07g0129700 | −1.14 | 0.24 | 3.75 | 0.00 |
| Efflux Carrier family protein. | Os05g0481900 | −1.13 | 0.46 | 3.69 | 0.00 |
| UDP-glucosyltransferase family | Os07g0490100 | −1.20 | 0.40 | 3.68 | 0.00 |
| protein. | | | | | |
| basic region leucin zipper | Os07g0182000 | −1.37 | 0.11 | 3.65 | 0.00 |
| zinc knuckle (CCHC-type) family | Os01g0775100 | −1.04 | 0.78 | 3.29 | 0.00 |
| protein | | | | | |
| Multitransmembrane protein | Os01g0700100 | −1.14 | 0.38 | 3.19 | 0.00 |
| Serine/Threonine protein kinases | Os08g0501000 | −1.26 | 0.25 | 3.15 | 0.00 |
| FYVE/PHD zinc finger domain | Os03g0421000 | −1.28 | 0.30 | 3.05 | 0.00 |
| containing protein | | | | | |

^{a}Numbers for full-length cDNA sequences of the corresponding genes.
^{b}Numbers represent the mean of three independent biological replicates. These microarray data sets can be found at http://www.ncbi.nlm.nih.gov/geo/ (Gene Expression Omnibus, GEO).
^{c}P values were analyzed by one-way ANOVA.

The application's sequence listing, which the Patent Office published only in electronic form, follows.

SEQUENCE LISTING (403 sequences)

SEQ ID NO: 1 - DNA, 1008 bp, Oryza sativa
atggaagaagggtccaacaaaagagaaggacttcctcctcaactcctagatctcatcccagatgagaaggaatggaagctgagagaagcattaggtctagggagatcaagaaacgcaggcttcgacggtgaagaagacaagaagctagacctaaagcttggtcttcctggttttatagaagatgatgaggcagaaaccttaagagattacaggctacagcaagagagcccatctctctcccttagtttctttccaaagcactccaagaccaccagcagcactactacgacaactggagcaaagaggggattcatagacacagttgaggacaaaacagaaggttataacgaccagaagcagcaggcaagggcaggatgtgggaaggaacttgcagtggaggaaatgatagcagccgtgagtgagaggaagaaaggatgctgccccccaccaccaccaccacatggtgctcctgctacacctgcgcgcaacagaccacagacccagggaagaggagctgcagcaccagtggttggttggcctccaattcgatccttcaggagaaaccttgctagtagtagttcatccaaacattcccctgaaccacaaaatgataatgccaatgcaaaggtgacgctcacctgcaagaaaaaccctcttgtaaaaatcaacatggatgggatccctattggaaggaaaatagaccttgcagcctataacagctatgatgggctatcgtcagctgtcaaacaactcttccatgggtttcttcaagctcaaaaggaccaaactaatgcgcaaattgcacagcaaggtgcagatgacaaaatattttatcaattgttggatgggtctggtgaatatactctagtttatgaagacagtgaaggagacaggatgctggttggggacgtgccatggaaagtatttgtctcaactgctaaaaggctgagggttctaaggagttcagagctttcccataccctgattggagctactgctagggtctag

SEQ ID NO: 2 - protein, 335 aa, Oryza sativa
MEEGSNKREGLPPQLLDLIPDEKEWKLREALGLGRSRNAGFDGEEDKKLDLKLGLPGFIEDDEAETLRDYRLQQESPSLSLSFFPKHSKTTSSTTTTTGAKRGFIDTVEDKTEGYNDQKQQARAGCGKELAVEEMIAAVSERKKGCCPPPPPPHGAPATPARNRPQTQGRGAAAPVVGWPPIRSFRRNLASSSSSKHSPEPQNDNANAKVTLTCKKNPLVKINMDGIPIGRKIDLAAYNSYDGLSSAVKQLFHGFLQAQKDQTNAQIAQQGADDKIFYQLLDGSGEYTLVYEDSEGDRMLVGDVPWKVFVSTAKRLRVLRSSELSHTLIGATARV

SEQ ID NO: 3 - DNA, 984 bp, Oryza sativa
atggaagaagaattcaaggacaaaggcctccctcccacgctgctacacctcatccctgacgggagagaatggaaggtgaaagaagcagatggagaaggatcaaggaacacaaacttagatgccgatgaggataaggagctagagcttaagctcggcctccctggtgtccaacaggaagagagagcagctgattcaagagagaagatacagcagcaacaacgagagagttcctcagaaccatccatcggttgcttccctacacattcaaagcctaccaccagcatcggcacaactggggcaaagagaggattttttgcgattgttggggccacactagaaggttataatcagagccaccgggacacagaagaatgtgggaaggagctaacgttaggagatgaaaatatggcaggtgagaggaagaaaggatgctgtccctcaccaccatgctcagctgcagcgcacagcagcaacccccaggggagaggtgctattcctccagtagtcggttggcctccaatccggtccttcaggagaaacctcacaaatggcagttcatttaaacagtcccctgaacgacaaaatgacgaagctgatgacaaggcaaagccaatctgcaagaagagacctcttgtcaaaatcaacatggatgggatccccattggaaggaaagtagaccttcaaatatacgacagctaccagaagctgtcatctgctgttgaagagttgttccgtggttttcttgaagctcaaaaagatctatcttgtgctgaaagtggagagcaaggggcagaagacaaaatattttcagggttgttggatggaactggtgtatacactttagtatatgaagacaatgatggagacagaatgttagctggggacataccatggaaggtatttgtttcgactgttaagaggttgagggttatgaggaggtcagaacttccccatgacatgattggagctgaccctgtgaagtag

SEQ ID NO: 4 - protein, 327 aa, Oryza sativa
MEEEFKDKGLPPTLLHLIPDGREWKVKEADGEGSRNTNLDADEDKELELKLGLPGVQQEERAADSREKIQQQQRESSSEPSIGCFPTHSKPTTSIGTTGAKRGFFAIVGATLEGYNQSHRDTEECGKELTLGDENMAGERKKGCCPSPPCSAAAHSSNPQGRGAIPPVVGWPPIRSFRRNLTNGSSFKQSPERQNDEADDKAKPICKKRPLVKINMDGIPIGRKVDLQIYDSYQKLSSAVEELFRGFLEAQKDLSCAESGEQGAEDKIFSGLLDGTGVYTLVYEDNDGDRMLAGDIPWKVFVSTVKRLRVMRRSELPHDMIGADPVK

SEQ ID NO: 5 - DNA, 588 bp, Zea mays
atggcaggtgagacgaagaaagggtgctgctgtcccccatcgtcgtcgcatgactcggatgccgggcctgctgtgcacagaggtgatgttcttccggtggttggttggcctccggtacggtccttcaggagaaacctggcaaatgccagctcgtctaagcaatccctcgagcagcaacaacaaaacgatgatgaagcctcctgtgacaaggcgaagcagacctgcaagagaagcccgctcatcaaaataaacatggacggcatccccattgggaggaaaataaacctctcagcgtacgacagctaccagaagctttcgtctgccgtccaagatttgttctgtggcttccttgatgcccagaaggatgaatctagagggcgaggagcagaagagaaaatgttctcagggttgttggatggaactggtgagtacactttagtttgtgaagacagtgaaggaggcaggacactagttgggcacctaccatggaatgtatttgtttctaccgctaagaggctgagggtcatggaaagctctgaacttcctcatggactgattaaaactgcctccgagagggctgatgactga

SEQ ID NO: 6 - protein, 195 aa, Zea mays
MAGETKKGCCCPPSSSHDSDAGPAVHRGDVLPVVGWPPVRSFRRNLANASSSKQSLEQQQQNDDEASCDKAKQTCKRSPLIKINMDGIPIGRKINLSAYDSYQKLSSAVQDLFCGFLDAQKDESRGRGAEEKMFSGLLDGTGEYTLVCEDSEGGRTLVGHLPWNVFVSTAKRLRVMESSELPHGLIKTASERADD

SEQ ID NO: 7 - DNA, 1074 bp, Zea mays
atgggagactccggaggaagaagaggaccacctcttcctcggctgctagatctcatcccggacgggaaagaacggaaggggagggaagcgcaagacgcgggaaggtcgaagaacagcggcggcttcgggggcgaggaggacgcgaagctggagctcaagctcgggcctccgggtctcactctcgtagaagaaggaacgacagctaccgtgccaagagatggaggcgtactacagcgagagacgacgaccaccccgaccctctcgctcgggtgcttcccacgtaacccctccaagcctgcggtagacgcagctacagctgggacgaagagggggttcttcgacaccgccgtcgaggccaagacagaaggccgcgacgagcggatggagcagcaggccggagctggatgtgggaacgagctagcactggacgagaagacggcagccgcggccgcgagtgagagacagaaagggtcctgctgcccgccgacgccacagcacgcccctcctgctgcgaccgtgcacagcggagcacacgtcctgcagctgggaagaaggccttcggctccggttgtcggttggcccccggtcagatccttcaggagaaaccttgctcatcatcatcatggaagctcctccaaacaacccaccgagccacagaacagcgaagctagcaggaaggagaagcctgcctgcaagaagaaccctctcgtaaaaatcaacatggacgggatccccatcggaaggaaagtagaccttgcagcctacgacagctacgagaggctatcactgggcgtcaaagagcttttccacggttttcttcaagctcaaaaggatatgtctccaactgctggaaagatattctctcaattgttggatggatctggcgaatataccctggtctacgaagacaacgaaggagacaggatgctggtaggggacgtgccgtggaatgtgtttgtgtcaactgctaaaaggctgagggttttgaggagctcggagcttgccaaaggtttggtaggcacaaggccacctcagattgcggtagctccgagaagaggaccaccagattgctga

SEQ ID NO: 8 - protein, 357 aa, Zea mays
MGDSGGRRGPPLPRLLDLIPDGKERKGREAQDAGRSKNSGGFGGEEDAKLELKLGPPGLTLVEEGTTATVPRDGGVLQRETTTTPTLSLGCFPRNPSKPAVDAATAGTKRGFFDTAVEAKTEGRDERMEQQAGAGCGNELALDEKTAAAAASERQKGSCCPPTPQHAPPAATVHSGAHVLQLGRRPSAPVVGWPPVRSFRRNLAHHHHGSSSKQPTEPQNSEASRKEKPACKKNPLVKINMDGIPIGRKVDLAAYDSYERLSLGVKELFHGFLQAQKDMSPTAGKIFSQLLDGSGEYTLVYEDNEGDRMLVGDVPWNVFVSTAKRLRVLRSSELAKGLVGTRPPQIAVAPRRGPPDC

SEQ ID NO: 9 - DNA, 1468 bp, Hordeum vulgare
  misc_feature (9)..(9): n is a, c, g, or t
gctgcaggnaattcggcacgagggttcatctcccgctggtgtagcatttggaggagtccgtctcggagactttgaattattggctcgccaggaacaagtcgtatgggagaaaactccatggaaagagaagccatgcctcggctcctggatctcatcccagacgagaaagaatggagcctgagaggaggagcacctgggcacggcggatcggaaaacacagggttcgggagcgacgaggacgagaagctggagctcaagcttggccttccaggccttgtaaaagaggagccagcggccagctcaagggacaacagggtggtgcatcaggagagcccggccctctcccttgggtaccacccccataaacactccacggccaaccccacgacgaccaccggggccaagagaggattcctggacacggttgaggccaaagcacaaggtcatgagaaggagcagaagcagcaggcgagagcagcagcgtgtgggaaggaactggcagcggaggaaaacacagcggccgcggccgtgggtgagaggaagaaaggctgctgtcccccaccgccgtcgcatgcccctcctgctgctgcacctgcgcgcaacatcggcaacagaccgcaggcgcggggaagaggggcttgcagttccagtggtcggttggcctccaatccgatcgttcaggagaaaccttgcaagcactagtgcatctaaacaggtccatgaaccgcaaattgctgaagccgatgccaaagcggcgctcaactgcaagaaaagccctctcgtaaaaatcaacatggatgggatccccattggaaggaaagttgatcttgcagcatgcgacagctacgagagactttcattggctgtcaaagatctcttccatgggtttcttgaagtgcaaagggacacgcctagggctgaacgtgcacagcaaggagcagatgaaaaaatattttcgcaattgctggacgggtccggtgaatataccctagtttacgaagacaatgaaggagacaggatgctggttggggatgtcccttggaatgtgtttgtctcaaccgctaaaaggctgagggttctgaggagctcggagctctcccatggcctggctggagttactctagagagagcagcaaattgctgaactgatggcggcttttcaaccatttggaatgttgctcactgaagccagatcgttatcctttttgtggatgactagtttagtacccctttttttgcttgtagggacgaatgtagtgagataaattagcataccgcagatgcatggagatatcctgactattttgtaaattaggctaccttgtatttaacgctatagttcttgactcggtgttacatgaatttggcgtttacaggagctctgatggctacacctgtgcagtgcctcttttcccggaaaaatttgtattcagccctgatgtatcagaaatgcaaatctgttcaggac

SEQ ID NO: 10 - protein, 232 aa, Hordeum vulgare
MRRSRSSRREQQRVGRNWQRRKTQRPRPWVRGRKAAVPHRRRMPLLLLHLRATSATDRRRGEEGLAVPVVGWPPIRSFRRNLASTSASKQVHEPQIAEADAKAALNCKKSPLVKINMDGIPIGRKVDLAACDSYERLSLAVKDLFHGFLEVQRDTPRAERAQQGADEKIFSQLLDGSGEYTLVYEDNEGDRMLVGDVPWNVFVSTAKRLRVLRSSELSHGLAGVTLERAANC

SEQ ID NO: 11 - DNA, 960 bp, Oryza sativa
atggaagaagggtccaacaaaagagaaggacttcctcctcaactcctagatctcatcccagatgagaaggaatggaagctgagagaagcattaggtctagggagatcaagaaacgcaggcttcgacggtgaagaagacaagaagctagacctaaagcttggtcttcctggttttatagaagatgatgaggcagaaaccttaagagattacaggctacagcaagagtgcccatctctctcccttggtttctttccaaagcactccaagaccaccagcagcactactacgacaactggagcaaagaggggattcatagacacagttgaggacaaaacagaaggttataacgaccagaagcagcaggcaagggcaggatgtgggaaggaacttgcagtggaggaaatgatagcagccgtgagtgagaggaagaaaggatgctgccccccaccaccaccaccacatggtgctcctgctacacctgcgcgcaacagaccacagacccagggaaggagaaaccttgctagtagtagttcatccaaacattcccctgaaccacaaaatgataatgccaatgcaaaggtgacgctcacctgcaagaaaaaccctcttgtaaaaatcaacatggatgggatccctattggaaggaaaatagaccttgcagcctataacagctatgatgggctatcgtcagctgtcaaacaactcttccatgggtttcttcaagctcaaaaggaccaaactaatgcgcaaattgcacagcaaggtgcagatgacaaaatattttatcaattgttggatgggtctggtgaatatactctagtttatgaagacagtgaaggagacaggatgctggttggggacgtgccatggaaagtatttgtctcaactgctaaaaggctgagggttctaaggagttcagagctttcccataccctgattggagctactgctagggtctag

SEQ ID NO: 12 - protein, 319 aa, Oryza sativa
MEEGSNKREGLPPQLLDLIPDEKEWKLREALGLGRSRNAGFDGEEDKKLDLKLGLPGFIEDDEAETLRDYRLQQECPSLSLGFFPKHSKTTSSTTTTTGAKRGFIDTVEDKTEGYNDQKQQARAGCGKELAVEEMIAAVSERKKGCCPPPPPPHGAPATPARNRPQTQGRRNLASSSSSKHSPEPQNDNANAKVTLTCKKNPLVKINMDGIPIGRKIDLAAYNSYDGLSSAVKQLFHGFLQAQKDQTNAQIAQQGADDKIFYQLLDGSGEYTLVYEDSEGDRMLVGDVPWKVFVSTAKRLRVLRSSELSHTLIGATARV

SEQ ID NO: 13 - DNA, 1728 bp, Triticum aestivum
  misc_feature (1571)..(1571): n is a, c, g, or t
  misc_feature (1573)..(1574): n is a, c, g, or t
  misc_feature (1581)..(1581): n is a, c, g, or t
  misc_feature (1590)..(1590): n is a, c, g, or t
  misc_feature (1592)..(1592): n is a, c, g, or t
catcctgcttccggagctcaccatcatcgtcccttgctggcctcaactgctcttctcactccatctcctgcatttggagtctcggagaccttgaattggctcgccaagaacaagtcctatggaagaaagctccatgaaaagagaagccatgccccgactcctggatctcatcccagacgagaaagaatggagtctgagaggaggagcaccagggcaggcaagatcgaaaaacacaggcttcgggagcgaagaggacgagaaactggagctgaagcttggccttccaggcctcgtagaggaggagccagcggccagctcaagggagaacaacagggtgcatcaggagagcccggccctctccctcgggtacccccctagacactccacgaccatcaccacgaccaccaccggagcaaagaggggattcctggacacggttgaggccaaagcacaaggttatgagaaggagcagaagcagcaggcgagggcagcagcatgtgggaaggaactggcagtggaggaaaatacagctaccgtcggtgagaggaagaaagggtgctgtcccccaccaccaccaccacatgcccctcctgctacacctgcgcgcaacatcggcaacagaccgcaggcgcggggaagaggggctgcagctccagtggtcggctggcctccaatccggtcattcaggagaaaccttgcaagcactagtgcatccaaacagccccctgaaccacaaatcggtgaagccgatgccaaggccgtgcttgactgcaagaaaagccctcttgtaaaaatcaacatggatgggatccccattggaaggaaagttgatcttgcagcatgtgacagctacgggagactttcattggctgtcaaagatctcttccacgggtttcttcaagtgcaaagggacccgtcgaaggttgaccgtacacagcaaggagcagatgaaaaaatattttcgcagttgctagacgggtccggtgaatatactctagtttacgaagacagtgaaggagacaggatgctggttggggatgtcccttggaatgtgtttgtctcaaccgctaaaaggctgagggttctgagaagctcagagctttcccatgatctgattggagctactcctgagagagcagcaaatggctgaaatggtgacacctttcaaaccatttggaatgttgctcactgaagccgtaaactaaaggaactcctaagaagcaggggagacctaaatcctgtggtcagtttggagatcgttatcctttttgaggattagtagttcggtaacctttttttttcttgtagtgagatgaattagcataccgcagatgcatggagatatcctgcctattttgtaaattaggctaccttgtatttaacgctatagttctcgattcagttacatagatttggcgcctattttctctgacaaatttgtaacctgacatgcaaatctgttcatgacaaaagaggaccagcacctggcctgtcctgatagcatcacaccaccgaacgatatatatggagtagcaacttcatgtggaatagctataaagttcagggttttncnnaaaacanacccccccncnaaaaaaagggcgggcgcttaaaatatcccagaggggccagtttcccgtcctcgtttttgataaaaggggcccatatggggtctataaaaagtaggccgggccgggtttaaaacgttgtaatggaaaactggtacta

SEQ ID NO: 14 - protein, 343 aa, Triticum aestivum
MEESSMKREAMPRLLDLIPDEKEWSLRGGAPGQARSKNTGFGSEEDEKLELKLGLPGLVEEEPAASSRENNRVHQESPALSLGYPPRHSTTITTTTTGAKRGFLDTVEAKAQGYEKEQKQQARAAACGKELAVEENTATVGERKKGCCPPPPPPHAPPATPARNIGNRPQARGRGAAAPVVGWPPIRSFRRNLASTSASKQPPEPQIGEADAKAVLDCKKSPLVKINMDGIPIGRKVDLAACDSYGRLSLAVKDLFHGFLQVQRDPSKVDRTQQGADEKIFSQLLDGSGEYTLVYEDSEGDRMLVGDVPWNVFVSTAKRLRVLRSSELSHDLIGATPERAANG

SEQ ID NO: 15 - DNA, 1689 bp, Triticum aestivum
ctcgcgctcaaagcctggtcggtaacagagccaaggtgccatttctcgacccccctctccacatacctctcctagctagctacccatccgcttccacttggccatttcccatcccacatcctgcttgcttccggagctcatcagcatcgcttggcctaaggctcgcttcaactgcctgctcttctcagctcatcccctgcatttggagtctcggagactttgaattggctcgccaagaacgagtcctatggaagaaagctccatgaaaagagaagccatgcctcgactcctggatctcatcccggacgagaaagaatggagcctgagaggaggagcgccagggcagggcaggtcaaaaaacacaggcttcgggagcgacgaggacgagaaactggagctgaagcttggccttccaggcctcgtacaagaggagccagcggccagctcaagagagaagagggtgcatcaggagagcccggccctctaccttgggtacccccctagacactccacggccaccacaacgacgaccaccaccggagcaaagagggggttcctggacacggttgaggccaaagcacaaggttatgagaaggagcaggcgagagcagcaacatgtgggaaggaactggcgatggaggaaaatacagaggccgtcggtgagaggaagaaagggtgctgtcccccaccaccaccagcacatgcccctcctgctacacctgcgcgcaacatcggcaacagaccgcaggcgcggggaagaggggctgcagctccagtggtcggctggcctccaatccggtcattcaggagaaaccttgcaagcactagtgcatccaaacagccccctgaaccgcaaatcggtgaagccaatgccaaggccgttcttgactgcaagaaaagccctcttgtaaaaatcaacatggatgggatccccattggaaggaaagttgatcttgcagcatgtgacagctacgagagactttcattggctgtcaaagatctcttccacgggtttcttcaagtgcaaagggacccgtctaaggttgaacgtacacagcaaggagcagatgaaaatatattttcgcggttgctagacgggtccggtgaatatactctagtttacgaagacagtgaaggagacaggatgctggttggggatgtcccttggaatgtgtttgtctcgaccgctaaaaggctgagggttctgagaagctcagagctttcccatggtctgattggagctactcctgagagaacagcacatggctgaaatggtgacaccttttcaaccatttgaaatgttgctcactgaagccggaaactaaatgaactcctaacaagcaggggaatgtctcctttgttactggtcgggaagacctaaatcctgtggtcagttcggagatcgttgtcctttttgaggattagtagttcagtaccctttttttttgcttgtagtgagatgaattagcataccgcagatgcatggagatatcctgcctattttgtaaattaggctaccttgtatttaacgctatagttcttgattcagttacacagattcggtgcctactttctctgacaaaatttgtaacctgacatgcaaatctgttcaggacaaaagaggaccagcacctggcctgtcctgatagcatcacaccaccgaacgatatataggattagcaacttcat

SEQ ID NO: 16 - protein, 340 aa, Triticum aestivum
MEESSMKREAMPRLLDLIPDEKEWSLRGGAPGQGRSKNTGFGSDEDEKLELKLGLPGLVQEEPAASSREKRVHQESPALYLGYPPRHSTATTTTTTTGAKRGFLDTVEAKAQGYEKEQARAATCGKELAMEENTEAVGERKKGCCPPPPPAHAPPATPARNIGNRPQARGRGAAAPVVGWPPIRSFRRNLASTSASKQPPEPQIGEANAKAVLDCKKSPLVKINMDGIPIGRKVDLAACDSYERLSLAVKDLFHGFLQVQRDPSKVERTQQGADENIFSRLLDGSGEYTLVYEDSEGDRMLVGDVPWNVFVSTAKRLRVLRSSELSHGLIGATPERTAHG

SEQ ID NO: 17 - DNA, 1273 bp, Triticum aestivum
aggccagctcgagcaaccacaacgagccgccgacgccgacgccgtgcgtggtctcgccattacttcctcgagctctccatcccggccgcggccaggactcctccggttgcagccctgctgcagctgtccgacccccgtctccggtgcggcacgtctagatccagtccaatggaacaaggcacccctccccggctgctgaacctcatcccggatgacaaggggtggcaggcgagggaagctcaagcaggccaccgaggaacaaggccaccattcgacgccgagcacgagcacgagcgcgaggaggacaaggagctggacctcaagctcggcctccccggagtccagcaccaaggagagagctgctcggcggtctccctggcgcgcttcgccacgcattcatgcctcaccagcaccaccaccggcgccaagagaggcttcttcgacgccgttggggccaaaccacaaggttatgatcggaggcagcaagaggacagggaaggacgtgcacctgtgcacagcagtagagaccccccggggagagctgctgttgttccggtagtcggctggcctccagtccgatccttcaggagaaacctcacaaatggaacttcatctaagcaacaatcccctgagcgacaaaaacgtcgaggccaccgacagagcgaagccggtctgcaagaagaaaccgctcatcaagatcaacatggatggaatacctattggaagaaaagtagacctcgcatcatgtgacaactaccataagctgtcgagtgccgtcgaagagttgttccgaggctttcttgaagcccagcaggatttatcttgtgatgaaagcggagtgcgaggagcagaagagaaattattttcagggttgctggatggaaccggtgaatacgctctagtgtacgaagatgacgaaggggacaggatgctggtcggggacataccatggagtgtgtttgtttcgactgcgaagagactgagggtcatgaggaggtcagagcttccccaacgcatgactggagctaactcaacgaaagtagcagattgctgaaaatgagggtgcatgcatttccatggcacagaccgcagttcatcacatttttggagatcgcccgtctttagctcacagtgatgaatctaaaaaggaggaaaaaaacatctcgtagttgcagctacagtgggcacactgcatatcttgtaaattaccctactctttgtttgaatgtagtgttggtcattgcaatagtacatgttgcagtaattgcctttg

SEQ ID NO: 18 - protein, 150 aa, Triticum aestivum
MELHLSNNPLSDKNVEATDRAKPVCKKKPLIKINMDGIPIGRKVDLASCDNYHKLSSAVEELFRGFLEAQQDLSCDESGVRGAEEKLFSGLLDGTGEYALVYEDDEGDRMLVGDIPWSVFVSTAKRLRVMRRSELPQRMTGANSTKVADC

SEQ ID NO: 19 - DNA, 1340 bp, Zea mays
agtgccttacaacactccatccatctccatgggagactccggaggaagaagaggaccacctcttcctcggctgctagatctcatcccggacgggaaagaacggaaggggagggaagcgcaagacgcgggaaggtcgaagaacagcggcggcttcgggggcgaggaggacgcgaagctggagctcaagctcgggcctccgggtctcactctcgtagaagaaggaacgacagctaccgtgccaagagatggaggcgtactacagcgagagacgacgaccaccccgaccctctcgctcgggtgcttcccacgtaacccctccaagcctgcggtagacgcagctagcagctgggacgaagagggggttcttacgccaccgccgtcgaggccaagacagaaggtccgcgacgagcggatggagcagcaggccggagctggatgtgggaacgagctagcactggacgagaagacggcagccgcggccgcgagtgagagacagaaagggtcctgctgcccgccgacgccacagcacgcccctcctgctgcgaccgtgcacagcggagcacacgtcctgcagctgggaagaaggccttcggctccggttgtcggttggcccccggtcagatccttcaggagaaaccttgctcatcatcatcatggaagctcctccaaacaacccaccgagccacagaacagcgaagctagcaggaaggagaagcctgcctgcaagaagaaccctctcgtaaaaatcaacatggacgggatccccatcggaaggaaagtagaccttgcagcctacgacagctacgagaggctatcactgggcgtcaaagagcttttccacggttttcttcaagctcaaaaggatatgtctccaactgctggaaagatattctctcaattgttggatggatctggcgaatataccctggtctacgaagacaacgaaggagacaggatgctggtaggggacgtgccgtggaatgtgtttgtgtcaactgctaaaaggctgagggttttgaggagctcggagcttgccaaaggtttggtaggcacaaggccacctcagattgcggtagctccgagaagaggaccaccagattgctgaaagcctgaaacagcgacaaaattctgatcatttggaatgtgagcaagcaaactgaacccggaccttttgtgatgtgacggtacttttttctttttgcctgtagaaactaatctagtgagatgaactgccatttcagatgcatgccgaggtcctggatattttgtaaattaggctaccaataccatgcgactcgttgctgtagagtaataatgtcctgatgtaattcaacatgggc

SEQ ID NO: 20 - protein, 358 aa, Zea mays
MGDSGGRRGPPLPRLLDLIPDGKERKGREAQDAGRSKNSGGFGGEEDAKLELKLGPPGLTLVEEGTTATVPRDGGVLQRETTTTPTLSLGCFPRNPSKPAVDAASSWDEEGVLTPPPSRPRQKVRDERMEQQAGAGCGNELALDEKTAAAAASERQKGSCCPPTPQHAPPAATVHSGAHVLQLGRRPSAPVVGWPPVRSFRRNLAHHHHGSSSKQPTEPQNSEASRKEKPACKKNPLVKINMDGIPIGRKVDLAAYDSYERLSLGVKELFHGFLQAQKDMSPTAGKIFSQLLDGSGEYTLVYEDNEGDRMLVGDVPWNVFVSTAKRLRVLRSSELAKGLVGTRPPQIAVAPRRGPPDC

SEQ ID NO: 21 - protein, 159 aa, Artificial sequence
  AUX/IAA domain: consensus sequence
  misc_feature (22)..(25): Xaa can be any naturally occurring amino acid
  misc_feature (35)..(35): Xaa can be any naturally occurring amino acid
  misc_feature (38)..(38): Xaa can be any naturally occurring amino acid
  misc_feature (44)..(44): Xaa can be any naturally occurring amino acid
  misc_feature (48)..(48): Xaa can be any naturally occurring amino acid
  misc_feature (93)..(93): Xaa can be any naturally occurring amino acid
  misc_feature (95)..(95): Xaa can be any naturally occurring amino acid
  misc_feature (98)..(98): Xaa can be any naturally occurring amino acid
APVVGWPPIRSFRRNLASTSSXXXXSKQPPEPQNXEAXAKAKLXCKKXPLVKINMDGIPIGRKVDLAAYDSYERLSSAVKDLFHGFLQAQKDXSXAEXAQQGADEKIFSQLLDGSGEYTLVYEDSEGDRMLVGDVPWNVFVSTAKRLRVLRSSELSHGL

SEQ ID NO: 22 - protein, 6 aa, Artificial sequence
  motif 1
  VARIANT (1)..(1): / replace = "Asn"
  VARIANT (2)..(2): / replace = "Met"
  VARIANT (4)..(4): / replace = "Trp"
  VARIANT (5)..(5): / replace = "Gly"
KIFSQL

SEQ ID NO: 23 - protein, 11 aa, Artificial sequence
  motif 2
  VARIANT (1)..(1): / replace = "Gly"
  VARIANT (6)..(6): / replace = "Thr"
  VARIANT (8)..(8): / replace = "Val"
QLLDGSGEYTL

SEQ ID NO: 24 - protein, 12 aa, Artificial sequence
  motif 3
LLDGSGEYTLVY

SEQ ID NO: 25 - protein, 11 aa, Artificial sequence
  motif 4
KKLELRLGPPG

SEQ ID NO: 26 - DNA, 2194 bp, Oryza sativa
aatccgaaaagtttctgcaccgttttcaccccctaactaacaatatagggaacgtgtgctaaatataaaatgagaccttatatatgtagcgctgataactagaactatgcaagaaaaactcatccacctactttagtggcaatcgggctaaataaaaaagagtcgctacactagtttcgttttccttagtaattaagtgggaaaatgaaatcattattgcttagaatatacgttcacatctctgtcatgaagttaaattattcgaggtagccataattgtcatcaaactcttcttgaataaaaaaatctttctagctgaactcaatgggtaaagagagagattttttttaaaaaaatagaatgaagatattctgaacgtattggcaaagatttaaacatataattatataattttatagtttgtgcattcgtcatatcgcacatcattaaggacatgtcttactccatcccaatttttatttagtaattaaagacaattgacttatttttattatttatcttttttcgattagatgcaaggtacttacgcacacactttgtgctcatgtgcatgtgtgagtgcacctcctcaatacacgttcaactagcaacacatctctaatatcactcgcctatttaatacatttaggtagcaatatctgaattcaagcactccaccatcaccagaccacttttaataatatctaaaatacaaaaaataattttacagaatagcatgaaaagtatgaaacgaactatttaggtttttcacatacaaaaaaaaaaagaattttgctcgtgcgcgagcgccaatctcccatattgggcacacaggcaacaacagagtggctgcccacagaacaacccacaaaaaacgatgatctaacggaggacagcaagtccgcaacaaccttttaacagcaggctttgcggccaggagagaggaggagaggcaaagaaaaccaagcatcctccttctcccatctataaattcctccccccttttcccctctctatataggaggcatccaagccaagaagagggagagcaccaaggacacgcgactagcagaagccgagcgaccgccttctcgatccatatcttccggtcgagttcttggtcgatctcttccctcctccacctcctcctcacagggtatgtgcctcccttcggttgttcttggatttattgttctaggttgtgtagtacgggcgttgatgttaggaaaggggatctgtatctgtgatgattcctgttcttggatttgggatagaggggttcttgatgttgcatgttatcggttcggtttgattagtagtatggttttcaatcgtctggagagctctatggaaatgaaatggtttagggatcggaatcttgcgattttgtgagtaccttttgtttgaggtaaaatcagagcaccggtgattttgcttggtgtaataaagtacggttgtttggtcctcgattctggtagtgatgcttctcgatttgacgaagctatcctttgtttattccctattgaacaaaaataatccaactttgaagacggtcccgttgatgagattgaatgattgattcttaagcctgtccaaaatttcgcagctggcttgtttagatacagtagtccccatcacgaaattcatggaaacagttataatcctcaggaacaggggattccctgttcttccgatttgctttagtcccagaattttttttcccaaatatcttaaaaagtcactttctggttcagttcaatgaattgattgctacaaataatgcttttatagcgttatcctagctgtagttcagttaataggtaatacccctatagtttagtcaggagaagaacttatccgatttctgatctccatttttaattatatgaaatgaactgtagcataagcagtattcatttggattattttttttattagctctcaccccttcattattctgagctgaaagtctggcatgaactgtcctcaattttgttttcaaattcacatcgattatctatgcattatcctcttgtatctacctgtagaagtttctttttggttattccttgactgcttgattacagaaagaaatttatgaagctgtaatcgggatagttatactgcttgttcttatgattcatttcctttgtgcagttcttggtgtagcttgccactttcaccagcaaagttc

SEQ ID NO: 27 - DNA, 1176 bp, Oryza sativa
atgccgagcagcggcggcgccatgcctgcccttccaccaggcttccgcttccaccccaccgacgaggagctcatcgttcactacctcatgaaccaggccgcctccgtcaagtgccccgtgccaatcatcgccgaggtcaacatctacaagtgcaacccatgggaccttcctggtaaggctttgttcggcgagaacgaatggtacttcttcagcccgagggaccgcaagtaccccaacggcgctcgccccaaccgcgccgccggctcggggtactggaaggccaccggcaccgacaagtccatcctctccactccgaccagcgacaacatcggcgtcaagaaggccctcgtcttctacaagggcaagcctcccaagggcgtcaagaccgactggatcatgcacgagtaccgtctcaccggcacatcagctaacagcaccaccaccacaaagcagcgtagagcgtcatccatgaccatgaggctggacgactgggtgctgtgcagaatccacaagaagagcaacgacttcaattcctctgaccaacacgaccaagaacccgaggaatcaaccgtcgaacagcttgaagacatccatgacaacaactcctctgaacaacctccagctccagctgacatgaacaaccaacagtcagatttccagcccatgacggcgatgagcatgagcaagtcatgctccctcaccgatctcctcaacaccatcgactgcgccgcgctctcgcagtttctcctcgacggctcatccgacgccatcgctgagcctcctgctcctcccagccccctaatatacacaacacctcatccaaattaccaaacactaaactataacattaacagcaacagcagcatgccacacgccttcgagtcacgcctagatcatcacgatggttacgttaacaattataatgttaatggcctgaggaggaagagaatgatggcgtgtagtgcaacttcctttgatgatggcagcagcagcaatgactttgtgcatgccgttgtcaagaaaccgcagctgctgccaagtgattcgaggggtagtggttttggaggaggttactgcaaccagcagctttcagagactgcgactggctttcagtttcagaacggcaatctgctgagccatccatttcctctgaacaatcatctgcagatgcagtag

SEQ ID NO: 28 - protein, 391 aa, Oryza sativa
MPSSGGAMPALPPGFRFHPTDEELIVHYLMNQAASVKCPVPIIAEVNIYKCNPWDLPGKALFGENEWYFFSPRDRKYPNGARPNRAAGSGYWKATGTDKSILSTPTSDNIGVKKALVFYKGKPPKGVKTDWIMHEYRLTGTSANSTTTTKQRRASSMTMRLDDWVLCRIHKKSNDFNSSDQHDQEPEESTVEQLEDIHDNNSSEQPPAPADMNNQQSDFQPMTAMSMSKSCSLTDLLNTIDCAALSQFLLDGSSDAIAEPPAPPSPLIYTTPHPNYQTLNYNINSNSSMPHAFESRLDHHDGYVNNYNVNGLRRKRMMACSATSFDDGSSSNDFVHAVVKKPQLLPSDSRGSGFGGGYCNQQLSETATGFQFQNGNLLSHPFPLNNHLQMQ

SEQ ID NO: 29 - DNA, 951 bp, Oryza sativa
atggggatggggatgaggagggagagggacgcggaggcggagctgaacctgccgccggggttcaggttccaccccacggacgacgagctggtggagcactacctgtgcaggaaggcggcggggcagcgcctgccggtgccgatcatcgccgaggtggatctctacaagttcgacccgtgggatctgcccgagcgcgcgctgttcggcgccagggagtggtacttcttcaccccgcgggatcgcaagtatcctaatgggtcacgccccaaccgcgccgccggcaacgggtactggaaggccaccggcgccgacaagcccgtcgcgccgcgggggcgcacgcttgggatcaagaaggcgctcgtgttctacgccggcaaggcgccgcgaggggtcaagactgattggatcatgcatgagtaccggctcgccgatgctggccgcgccgccgcgggcgccaagaagggatctctcaggttggatgattgggtgctgtgtcggctgtacaacaagaagaacgagtgggagaagatgcagcaggggaaggaggtgaaggaggaggcgtccgacatggttacgtcgcagtcgcactcgcacacccactcgtggggcgagacgcgcacgccggagtcggagatcgtggacaacgaccccttcccggagctggactcgttcccggcgttccagcctgcgccgccgccggcgacggcgatgatggtgcccaagaaagaatcgatggacgacgccaccgcggccgccgccgccgccgccaccatccccaggaacaacagcagcctgttcgtggacctgagctacgacgatatccagggcatgtacagcggcctcgacatgctgccgccgggcgacgacttctactcgtcgctcttcgcgtcgccgcgggtgaaggggacgacgccacgcgccggcgccggcatgggcatggtcccgttctga

SEQ ID NO: 30 - protein, 316 aa, Oryza sativa
MGMGMRRERDAEAELNLPPGFRFHPTDDELVEHYLCRKAAGQRLPVPIIAEVDLYKFDPWDLPERALFGAREWYFFTPRDRKYPNGSRPNRAAGNGYWKATGADKPVAPRGRTLGIKKALVFYAGKAPRGVKTDWIMHEYRLADAGRAAAGAKKGSLRLDDWVLCRLYNKKNEWEKMQQGKEVKEEASDMVTSQSHSHTHSWGETRTPESEIVDNDPFPELDSFPAFQPAPPPATAMMVPKKESMDDATAAAAAAATIPRNNSSLFVDLSYDDIQGMYSGLDMLPPGDDFYSSLFASPRVKGTTPRAGAGMGMVPF

SEQ ID NO: 31 - DNA, 912 bp, Oryza sativa
atgagcggcggtcaggacctgcagctgccgccggggttccggttccacccgacggacgaggagctggtgatgcactacctctgccgccgctgcgccggcctccccatcgccgtccccatcatcgccgagatcgacctctacaagttcgatccatggcagcttccccggatggcgctgtacggagagaaggagtggtacttcttctccccgcgagaccgcaagtacccgaacgggtcgcggccgaaccgcgccgccgggtcggggtactggaaggcgaccggcgccgacaagccggtgggctcgccgaagccggtggcgatcaagaaggccctcgtcttctacgccggcaaggcgcccaagggcgagaagaccaactggatcatgcacgagtaccgcctcgccgacgtcgaccgctccgcccgcaagaagaacagcctcaggttggatgattgggtgctgtgccggatttacaacaagaagggcgggctggagaagccgccggccgcggcggtggcggcggcggggatggtgagcagcggcggcggcgtccagaggaagccgatggtgggggtgaacgcggcggtgagctccccgccggagcagaagccggtggtggcggggccggcgttcccggacctggcggcgtactacgaccggccgtcggactcgatgccgcggctgcacgccgactcgagctgctcggagcaggtgctgtcgccggagttcgcgtgcgaggtgcagagccagcccaagatcagcgagtgggagcgcaccttcgccaccgtcgggcccatcaaccccgccgcctccatcctcgaccccgccggctccggcggcctcggcggcctcggcggcggcggcagcgaccccctcctccaggacatcctcatgtactggggcaagccattctag

SEQ ID NO: 32 - protein, 303 aa, Oryza sativa
MSGGQDLQLPPGFRFHPTDEELVMHYLCRRCAGLPIAVPIIAEIDLYKFDPWQLPRMALYGEKEWYFFSPRDRKYPNGSRPNRAAGSGYWKATGADKPVGSPKPVAIKKALVFYAGKAPKGEKTNWIMHEYRLADVDRSARKKNSLRLDDWVLCRIYNKKGGLEKPPAAAVAAAGMVSSGGGVQRKPMVGVNAAVSSPPEQKPVVAGPAFPDLAAYYDRPSDSMPRLHADSSCSEQVLSPEFACEVQSQPKISEWERTFATVGPINPAASILDPAGSGGLGGLGGGGSDPLLQDILMYWGKPF

SEQ ID NO: 33 - DNA, 1180 bp, Oryza sativa
ttccaaaactttcgaaagcttccattagcgactaatccagccttcgttaagggtgattagaatttgattaatttcaaggcctcagatcggagattgaatggagtgcggtggtgcgctgcagctgccgccggggttcaggttccacccgacggacgacgagctggtgatgtactacctgtgccgcaagtgcggcggcctccccctcgccgccccggtgatcgccgaggtggacctctacaagttcaacccatgggatctccccgagagggcgatgggaggggagaaggagtggtacttcttctcgccgcgggaccggaagtacccgaacgggcagcggccgaacagggcggcggggacggggtactggaaggcgacgggggcggacaagccggtggggtcgccgcgggcggtggcgatcaagaaggcgctcgtcttctacgccgggaagccgcccaagggcgtcaagaccaactggatcatgcacgagtaccgcctcgccgacgtcgaccgctccgccgccgcccgcaagctctccaagtcctcccacaacgccctcaggttggatgattgggtgttgtgccgaatctacaacaagaagggagtgatcgagaggtacgacacggtggacgccggcgaggacgtgaagccggcggcggcggcggcggcggcgaagggtggtcgcatcggcggcggcggcggcgcggcggcgatgaaggtggagctctccgactatgggttctacgaccaggagccggagtcggagatgctgtgcttcgaccggtcggggtcggcggaccgcgactcgatgccgcggctgcacaccgactccagcgggtcggagcacgtgctgtcgccgtcgccgtcgccggacgacttccccggcggcggcgaccacgactacgccgagagccagcccagcggcggatgcggcgggtggcccggcgtcgactgggccgccgtcggcgacgatggcttcgtcatcgacagctccctcttcgagctgccctcgccggcggcgttctcccgcgccgccggcgacggcgccgccttcggcgacatgttcacgtacctgcagaagccgttctaattaacggaacgtgacgcctctgcaaacgctaattagctcactaaccactgtcaggtcgatcgtgtaattcttttaccagtctagggtacagcc

SEQ ID NO: 34 - protein, 329 aa, Oryza sativa
MECGGALQLPPGFRFHPTDDELVMYYLCRKCGGLPLAAPVIAEVDLYKFNPWDLPERAMGGEKEWYFFSPRDRKYPNGQRPNRAAGTGYWKATGADKPVGSPRAVAIKKALVFYAGKPPKGVKTNWIMHEYRLADVDRSAAARKLSKSSHNALRLDDWVLCRIYNKKGVIERYDTVDAGEDVKPAAAAAAAKGGRIGGGGGAAAMKVELSDYGFYDQEPESEMLCFDRSGSADRDSMPRLHTDSSGSEHVLSPSPSPDDFPGGGDHDYAESQPSGGCGGWPGVDWAAVGDDGFVIDSSLFELPSPAAFSRAAGDGAAFGDMFTYLQKPF

SEQ ID NO: 35 - DNA, 453 bp, Oryza sativa
atgtcgctggtgaggcgcagcaacgtgttcgacccattctccctcgacctctgggaccccttcgacagcgtgttccgctccgtcgtcccggccacctccgacaacgacaccgccgccttcgccaacgcccgcatcgactggaaggagacgccggagtcgcacgtcttcaaggccgacctccccggcgtcaagaaggaggaggtgaaggtggaggtggaggaaggcaacgtgctggtgatcagcggccagcgcagcaaggagaaggaggacaagaacgacaagtggcaccgcgtggagcgcagcagcgggcagttcatgcggcggttcaggctgccggagaacgccaaggtggaccaggtgaaggccggactggagaacggcgtgctcactgtcaccgtgcccaaggccgaggtcaagaagcctgaggtgaaggccattgagatctccggttaa

SEQ ID NO: 36 - protein, 150 aa, Oryza sativa
MSLVRRSNVFDPFSLDLWDPFDSVFRSVVPATSDNDTAAFANARIDWKETPESHVFKADLPGVKKEEVKVEVEEGNVLVISGQRSKEKEDKNDKWHRVERSSGQFMRRFRLPENAKVDQVKAGLENGVLTVTVPKAEVKKPEVKAIEISG

SEQ ID NO: 37 - DNA, 2397 bp, Oryza sativa
atgtcaaaaagaacactactcacgtattattctagttcaagcaacacagatccttcacctagcaccgagaatttaagtcagccgaagaggcctagggcagagtttagtcaatcagatataattggtgatccagggcttcgcaaaccaattgaagcttatccacctgaaattagagatcaagtaaagagggcatatgcattgagtggcccaactcaacctaatattactatatttcctcgtaaatggcaaggtggtgagtggagatcctttcaaaaaacttggttcaatgagtttgattggctagagtatagtgtttcaaaggatgcagcttattgcttgtattgttacattttctttgaaccgggaaaacctgaaaagtttgggagtgctgtctttgctaaggaaggttatgtcaattggaagaaaggtaaagataggcttaccgtacatagtaattgcaagactcacaatgatgctaggaataaatgtgaagactttatgaaccaaagaacaagtgtatctaaaaaaattgagattgttagcaaggaggaagaaattagatacaagattcggttgacatcttctttagatgttgtaaggtttctcattgaacaaggtgatgcttttcgtggacatgatgagtctgatacttcccttagcaagggtaaatttaaagagatggttgattggtacaaagacaaggttcctgaagtgaaggatgcatatgaaaagggccttaaaaattgccaaatggtatcacatcatattcagaaggatcttactaaagcttgtgcagaaaaagtgacggcagttattatggatgagattggaaatagaaatttctctgtacttattgatgagtctcgagatgtatcaataaaggagcaaatgggtgtcatcttgaggtttgtgaatgatgaaggaaaggtgatggagaggtttcttggtcttcaacatattgagagatgtacggctattgctttgaaggaagctttatttggtatgatctctagtcataagttaaccatctctaagattcggggccaaggttatgacggagcttctaacatgagaggggaatttaatggtgtgcaaaaattgattcgggatgaaaatccttatgctttttatgtccattgttttgcccatcagctacaactagtagttgttgctgtttcaacttctactccagccattgcagatttttttaactatgtgcctttaatagtcaacactgtgggtgcatcttgtatgcgaaaggatgccttgcttgcaaagcatcacgatgtattgttagaaaaggtggagaatggtgagattaccactggaagaggcctgaaccaagaaagtagcctagctaggcctggagatactagatggggttcacatcttaaaactttgcttcgtattctagtaatgtgggaggctatcatagatgtgctcgagattgttaagaaagattcaaccaaaccaacatttaatggtggagcatttggtttgatgggtaaaatgcaaagctttgattttgtattcatcatgcatttgatgatagacatgttgagcattacagatgacttgtcacgtgctttgcaaagaaaggaccaagatattgttgaggcaatgagtttgctcatagatgtgaaagagctcttgcaggacatgagggagaatggatgggagccactattgaatagggtgatttcattctgtaataaacatgagattaaagtgccaaaaatggacaaggaagttaatgaaagagggacatctacacatcgaaggcacaaggtaacaaataagcattactatcatgttgagatctatcttgcagccattgatgccattttggttgaaatgaaccatcgctttagtgaagttagttcagagttattagtatgcatgtcatctcttaatccacggaattccttctccaattttgatgtggataagcttgtgaggcttgctgaaatttatgctgaagattttttggttggtgatcttatgctactacgaactcaacttggaaattttattagcaatgttaggagaagtaaagaatttcttggatgtaaagatcttgcaaaggttgctgaattaatggttcaaaccggaaagaatagaacttatcacttggtgtataggctcattgagttatcattgatacttccggtggcaacggcttcagttgagagggtcttctcagctatgtctcttataaagatagatttgcgaaacaaaatgggggatgaatggctcaatgacttgatgatttgctacactgagaagcagatttttagaagtattagtgatgaaaaaatcatccaacactttgaagagatgaaaaagcgtcgaatgctagtgcttcaacagaaattagtgattactaatgaagaataa

SEQ ID NO: 38 - protein, 798 aa, Oryza sativa
MSKRTLLTYYSSSSNTDPSPSTENLSQPKRPRAEFSQSDIIGDPGLRKPIEAYPPEIRDQVKRAYALSGPTQPNITIFPRKWQGGEWRSFQKTWFNEFDWLEYSVSKDAAYCLYCYIFFEPGKPEKFGSAVFAKEGYVNWKKGKDRLTVHSNCKTHNDARNKCEDFMNQRTSVSKKIEIVSKEEEIRYKIRLTSSLDVVRFLIEQGDAFRGHDESDTSLSKGKFKEMVDWYKDKVPEVKDAYEKGLKNCQMVSHHIQKDLTKACAEKVTAVIMDEIGNRNFSVLIDESRDVSIKEQMGVILRFVNDEGKVMERFLGLQHIERCTAIALKEALFGMISSHKLTISKIRGQGYDGASNMRGEFNGVQKLIRDENPYAFYVHCFAHQLQLVVVAVSTSTPAIADFFNYVPLIVNTVGASCMRKDALLAKHHDVLLEKVENGEITTGRGLNQESSLARPGDTRWGSHLKTLLRILVMWEAIIDVLEIVKKDSTKPTFNGGAFGLMGKMQSFDFVFIMHLMIDMLSITDDLSRALQRKDQDIVEAMSLLIDVKELLQDMRENGWEPLLNRVISFCNKHEIKVPKMDKEVNERGTSTHRRHKVTNKHYYHVEIYLAAIDAILVEMNHRFSEVSSELLVCMSSLNPRNSFSNFDVDKLVRLAEIYAEDFLVGDLMLLRTQLGNFISNVRRSKEFLGCKDLAKVAELMVQTGKNRTYHLVYRLIELSLILPVATASVERVFSAMSLIKIDLRNKMGDEWLNDLMICYTEKQIFRSISDEKIIQHFEEMKKRRMLVLQQKLVITNEE

SEQ ID NO: 39 - DNA, 888 bp, Oryza sativa
atgccggccgacgcgcgagctgctccgccgtcgtgcccgttcccgacgatacggtcgcatggcgccgccgtggcgaggtcgcacgcctacgactggctcgcgctgctcctcctcgtcgccgtcgacggcctcctcaacgccatcgagccgttccaccggttcgtcggcgccggcatgatgaccgatctcagataccccatgaagcgcaacaccgtccccatctgggccgtcccgatcgtcgctgtcattgggcccatgattgtcttcaccgtcgtctacttcaggaggaggaacgtgtacgatcttcaccatgctgtgctaggcattctgttttcggtgctgattaccggcgtgctcaccgacgcgatcaaggatgccgtcggccgcccgaggccgaacttcttctggcgctgcttccccgacggaatcgcggtgttcgataacgtcaccacgggagtcatctgccacggcgacgcgagcgtgatcaaggagggacacaagagcttcccgagcggccacacttcatggtctttcgccggtctggggttcctgtcgtggtaccttgccgggaagatcacggtgttcgaccggcgcgggcacgtcgccaagctgtgcgtcgtcctcgcgcctctgctcgttgcggcgatggtcgccatctcgagggtggacgactactggcaccattggcaagacgtctgcacgggaggcgtccttggattggtggttgcctctgtctgctatcttcagttcttcccggctccttcagatgagaaagggttctggcctcacgcgcactttaggtacatcaccgagaggggaagcgagaacccaacgcagcaagccaccgaaccactggacgccatggaaaccggtaggggaggccaatga

SEQ ID NO: 40 - protein, 295 aa, Oryza sativa
MPADARAAPPSCPFPTIRSHGAAVARSHAYDWLALLLLVAVDGLLNAIEPFHRFVGAGMMTDLRYPMKRNTVPIWAVPIVAVIGPMIVFTVVYFRRRNVYDLHHAVLGILFSVLITGVLTDAIKDAVGRPRPNFFWRCFPDGIAVFDNVTTGVICHGDASVIKEGHKSFPSGHTSWSFAGLGFLSWYLAGKITVFDRRGHVAKLCVVLAPLLVAAMVAISRVDDYWHHWQDVCTGGVLGLVVASVCYLQFFPAPSDEKGFWPHAHFRYITERGSENPTQQATEPLDAMETGRGGQ

SEQ ID NO: 41 - DNA, 909 bp, Oryza sativa
atggctcccaggctctgctgctcttctcaattcttgctcgccgtctccttcctggccgccttcgcggccgtctccaacgccggcaaggtggccgtctactgggggcagggggcgggcaacggcgacggcaccctcgccgagacatgcgccaccggcctgtacgacttcgtcaacatcgccttcctcaacgtctacggcagcggccttaccccggtgctcaacctcgccgcccactgcaatccggacgcggggacctgcaagtcgctcagctccgagatcagctcctgccagcagagcggcgtgaaggtgctcctctccctcggcggcgagagaggtcagtactccctctcctccgccgacgacgcgcgtggcgtcgccgactacctctggaacaccttcctcggcggcagctcggactcgcgccccctcggcgacgcggtgctcgacggcatcgacttcgacatagagaaggacggtgaccactacgacgagctggcgatggccctctcgtcgaaatgcaacggcgcgtgcgtgctcacggcggcgccgcagtgcccgtacccggacgcccacctcgacgcggcgatcaagaccggggtgttcagccacgtttgggtgcagttctacaacaaccggcagtgccagtacgccagcggcgacgcgagcgcgctgcaggccgcgtgggcgcagtggacgagcggcgtgccggcgcccgcggacgtcttcctgggcctgccgacggcgccggccgctgcaccgagcggaggctacatcgacgcggacacgctgctgtcgcaggtgctaccggcggtggagggcgcggcggcgaactacggcggagtcatgctgtggaatcgctggagagacgtgaccgctggttatggcgccaagttgaaggggaaagtttga

SEQ ID NO: 42 - protein, 302 aa, Oryza sativa
MAPRLCCSSQFLLAVSFLAAFAAVSNAGKVAVYWGQGAGNGDGTLAETCATGLYDFVNIAFLNVYGSGLTPVLNLAAHCNPDAGTCKSLSSEISSCQQSGVKVLLSLGGERGQYSLSSADDARGVADYLWNTFLGGSSDSRPLGDAVLDGIDFDIEKDGDHYDELAMALSSKCNGACVLTAAPQCPYPDAHLDAAIKTGVFSHVWVQFYNNRQCQYASGDASALQAAWAQWTSGVPAPADVFLGLPTAPAAAPSGGYIDADTLLSQVLPAVEGAAANYGGVMLWNRWRDVTAGYGAKLKGKV

SEQ ID NO: 43 - DNA, 693 bp, Oryza sativa
atggactccttgtatgatatctcctgctttgctgctggtcttgcaggcaacatctttgcgcttgctctcttcctgtcgccagtgacgacgtttaagaggatcctgaaggccaaatcgaccgagcgattcgacgggctcccttacctgttctcgctgctgaattgcctcatctgcctgtggtatggacttccctgggtcgccgatggcaggctgctcgtcgctaccgtcaacggcattggagcggtgttccagctcgcctacatttgcctcttcatcttctacgcggacagcaggaagacgaggatgaagatcatagggctcttggtgctggtagtttgcgggtttgcgctagtttcacatgcgagcgtctttttctttgatcaaccgcttcggcagcagtttgtgggagctgtgagcatggcttcgctgatctccatgttcgcttctccgttagctgtcatgggagttgtgattcggtcagagtctgtggagttcatgccgttctatctgtcactctctacgttcttgatgagcgccagttttgcattgtatgggttgctgctgcgagatttcttcatttatttccctaatgggcttggacttatcctgggagcaatgcagctggcgctctacgcttactacagcagaaaatggagaggccaggattcatctgcaccgttgctgctcgcatga

SEQ ID NO: 44 - protein, 230 aa, Oryza sativa
MDSLYDISCFAAGLAGNIFALALFLSPVTTFKRILKAKSTERFDGLPYLFSLLNCLICLWYGLPWVADGRLLVATVNGIGAVFQLAYICLFIFYADSRKTRMKIIGLLVLVVCGFALVSHASVFFFDQPLRQQFVGAVSMASLISMFASPLAVMGVVIRSESVEFMPFYLSLSTFLMSASFALYGLLLRDFFIYFPNGLGLILGAMQLALYAYYSRKWRGQDSSAPLLLA

SEQ ID NO: 45 - DNA, 648 bp, Oryza sativa
atggcttctcagcaggaacgggctagctaccacgccggcgagaccaaggcccgcgccgaggagaagacggggcgcatgatgggcacggcgcaggagaaggcgcgggaggccaaggacacggcgtccgacgccgcggggcgcgcgatgggcaggggacacggcgccaaggaggcgaccaaggagaaggcgtacgagaccaaggacgcgaccaaggagaaggcgtacgaggcaaaggacgcggcctccgacgccaccggccgcgccatggacaagggccgcggcgccgcgggcgccacgagggacaaggcgtacgatgccaaggacagggcggctgacacggcgcagtccgccgccgaccgcgcccgcgacggcgccgggcagaccgggagctacattggacagaccgccgaggccgccaagcagaaagcggccggcgccgcgcagtacgccaaggagaccgcgatcgccggcaaggacaagaccggcgccgtgctccagcaggcaggggagcaggtgaagagcgtggcggtgggggcgaaggacgcggtgatgtacacgctcgggatgtcaggcgataacaagaacaacgccgctgccggcaaggacaccagcacctacaagcctggaactgggagtgactaccagtaa

SEQ ID NO: 46 - protein, 215 aa, Oryza sativa
MASQQERASYHAGETKARAEEKTGRMMGTAQEKAREAKDTASDAAGRAMGRGHGAKEATKEKAYETKDATKEKAYEAKDAASDATGRAMDKGRGAAGATRDKAYDAKDRAADTAQSAADRARDGAGQTGSYIGQTAEAAKQKAAGAAQYAKETAIAGKDKTGAVLQQAGEQVKSVAVGAKDAVMYTLGMSGDNKNNAAAGKDTSTYKPGTGSDYQ

SEQ ID NO: 47 - DNA, 2352 bp, Oryza sativa
atggatgtgatgaatgaagggaaagaaacgtctgacaacttctgtgtggataagctggagaaagaggacgaagtgggtagctgtcccacaagatactgcaacgatacttcccacagtctaggttcagcttccagaaaagaggtcatgcctattattgctgaaaaacaggctttctgtgcaactactgtccatgatgaaagatcttgggcagctaatgcttggcgtgctcgattagtaaaagcaattagtcagaaggactctgttttgccaaagaatgcagacaatatacattcaacttcggcctttgggagcattggtaatacagaaaacatgcctggcaaattgacaagtatgctaggtaatagaaatgacagtagccaagatcaggctatgcaggaaaagcataaggatgggcttattgttgctagatgtgagtccgtgtctgctgtgaatcctgttgctagatgtgagttagcatctggtgttaatcctttagcaagacatgagtcgacatccggttgtaatcctagaaagctcgagaaggggaaagaaaagcttatctatgatatgagtaattgtgttagcaacacaaatgaaggtgatgacagcaatgagagtatagagagctgcccaagtacaaaagctccgaagcggaagcatggtcaattttctgcagctgagatgacgtctggaaataaaagatgtagaagggaagataatgagagttcttgttcaggattattccacaaaaatgatagctctttctttaactggatgtcaactctcactaatggagtaaaggtgtttgatgaaactactgctgttccacttaatcagaagttttcagcagctacaggagaggaatttccaacaaaccctgtgccacttcaaaacaactgtggtgttccgctgcaatccgttggcttcaattctctttttcaatctctttatagtcagaatgttatgataacttcaagaaatacctgtcaccagtcagaaagcagttacaccgccaacaggctaacactgggtttcaagagtagcaaaccagttagcatgggcagagaaactcttaatgtggctactgagactttagctgcgggcagaattcaaatggattcttatggtgacagaggggcatttcaaaatcaaatgggaattttccctttaagagcagaaagaaatcagaatgggttccatggaagctcttcaaatgctgcatcgggacataaagatgatttctcagaaagcttatgggtaagtagacttttgccaaaaacacccatgaaagtgatggacacaacgcgctgtgatgaagaaactgatttttgttctgctaacccaaaaggtttaggtgatagttcatcaccgcaggattttaatgtggagaaggaattaaacaattcacaatactttactagcaaaggaagtgacaatgaaactacaagtagcaaatgtgcggcgcctcaagacgaaaataaaccatcagaaacaatggcatcaatttttgctaaaagattggatgcgcttagacatgcaaatacatcagcagtacatgtggccattacatgtgaccatggaacacccaaagggcgtaatcacaaaacaagttcttttgttgttagttacaatagtcatgatgagcaagaatctggacaaaaaactcacaagtcttctggtggagaaggaagaatagttttatggacaggtgacaaaggtaaggaacaattatctcctgggaatgacaaagaattaggagaaaaggttttgtctaagcatgaaaatcagaattgtgaagggagctctgatggaaaggtggtaccccctaaatgtaatttagaaacaaacacatatattgaagaaattgatcggaagagactacaaaataaagaaggagcaccaaattccatggagaatcagccagataacaaacaaatggtaccttatggtattgtgcccaatgatgtttatgacgaagcaagtgtagtttttggagccttgcagaggctccgtttgtctcgctccgatataataagatggatgaggtcaccagttatgcacaccaccttagatggctttttcttgcgtctacgatttggtaaatgggaggaagcattgggtggcactggatatcatgttgccaggataaatggagtactggataagaatcgcctttctgtgaccatcaggaattcaacttgccaagtagattctcgctttgtatccaaccatgacttccaccaggatgagctgaaggcatggtggtcagctgccatgaagagtggctggaaactgccttcgcaagaagaactcaatacgaagctacgagaaagagagctgcttcgtttttga

SEQ ID NO: 48 - protein, 783 aa, Oryza sativa
MDVMNEGKETSDNFCVDKLEKEDEVGSCPTRYCNDTSHSLGSASRKEVMPIIAEKQAFCATTVHDERSWAANAWRARLVKAISQKDSVLPKNADNIHSTSAFGSIGNTENMPGKLTSMLGNRNDSSQDQAMQEKHKDGLIVARCESVSAVNPVARCELASGVNPLARHESTSGCNPRKLEKGKEKLIYDMSNCVSNTNEGDDSNESIESCPSTKAPKRKHGQFSAAEMTSGNKRCRREDNESSCSGLFHKNDSSFFNWMSTLTNGVKVFDETTAVPLNQKFSAATGEEFPTNPVPLQNNCGVPLQSVGFNSLFQSLYSQNVMITSRNTCHQSESSYTANRLTLGFKSSKPVSMGRETLNVATETLAAGRIQMDSYGDRGAFQNQMGIFPLRAERNQNGFHGSSSNAASGHKDDFSESLWVSRLLPKTPMKVMDTTRCDEETDFCSANPKGLGDSSSPQDFNVEKELNNSQYFTSKGSDNETTSSKCAAPQDENKPSETMASIFAKRLDALRHANTSAVHVAITCDHGTPKGRNHKTSSFVVSYNSHDEQESGQKTHKSSGGEGRIVLWTGDKGKEQLSPGNDKELGEKVLSKHENQNCEGSSDGKVVPPKCNLETNTYIEEIDRKRLQNKEGAPNSMENQPDNKQMVPYGIVPNDVYDEASVVFGALQRLRLSRSDIIRWMRSPVMHTTLDGFFLRLRFGKWEEALGGTGYHVARINGVLDKNRLSVTIRNSTCQVDSRFVSNHDFHQDELKAWWSAAMKSGWKLPSQEELNTKLRERELLRF

SEQ ID NO: 49 - DNA, 957 bp, Oryza sativa
atggaaatggcggcggcggttgggggcagcgggaggagggacgcggaggcggagctgaacctgccgccgggcttccgtttccacccgaccgacgaggagctcgtggtgcactacctctgccgcaaggttgcccggcagccgctccccgtcccaatcatcgccgaggtcgacctctacaagctcgacccctgggatctccctgagaaggcgttgttcgggaggaaagagtggtacttcttcacgccgagggaccggaagtacccgaacgggtcgaggccgaaccgcgcagcggggagagggtactggaaggcgacgggagccgacaagccggtggcgcccaaggggagcgcgaggacggtggggatcaagaaggcgctcgtgttctactccgggaaggcgccgaggggggtcaagacggactggatcatgcacgagtaccgcctcgccgacgccgaccgcgccccgggcggcaagaagggctcacagaagctggacgagtgggtgctgtgccggctgtacaacaagaagaacaactgggagaaggtgaagctggagcagcaggacgtggcctccgtggcggcggcggcgccgcgcaaccaccaccatcagaacggcgaggtcatggacgcggcggcggctgacaccatgtccgacagcttccagacgcacgactccgacatcgacaacgcctccgccggcctgcggcacggtggctgcggcggcggcggcttcggcgacgtggcgccgccgaggaatgggttcgtgacggtgaaggaggacaacgactggttcaccggcctcaacttcgacgagctgcagccgccgtacatgatgaacctgcagcacatgcagatgcagatggtgaatccggcggcgccagggcacgacggcggctacttgcagtccatcagctcgccgcagatgaagatgtggcagacaatcctgccaccattctga

SEQ ID NO: 50 - protein, 318 aa, Oryza sativa
MEMAAAVGGSGRRDAEAELNLPPGFRFHPTDEELVVHYLCRKVARQPLPVPIIAEVDLYKLDPWDLPEKALFGRKEWYFFTPRDRKYPNGSRPNRAAGRGYWKATGADKPVAPKGSARTVGIKKALVFYSGKAPRGVKTDWIMHEYRLADADRAPGGKKGSQKLDEWVLCRLYNKKNNWEKVKLEQQDVASVAAAAPRNHHHQNGEVMDAAAADTMSDSFQTHDSDIDNASAGLRHGGCGGGGFGDVAPPRNGFVTVKEDNDWFTGLNFDELQPPYMMNLQHMQMQMVNPAAPGHDGGYLQSISSPQMKMWQTILPPF

SEQ ID NO: 51 - DNA, 429 bp, Oryza sativa
gagtggttgcggcggcgctgctactgctttgttagatcttgttgctgtaagagggactatccagttggtatggaggaacctgcacaagagcagcgtcggctcatgcagatcaggtccaaaacgttgctatctgaggttttgagaggcataggcgcaaatgaggcacgatacagttgccgtgctgtagcagatggctatgttgggtttgctgaggcaactgtttatggtgcaagaggagttggagagccttttgttgttcgtgcacagggtatttcagctataagaccatgcgatgcggaagaaagcgctgcacatgctttaatttctgttatcaagaaagaatgtagtgtggagttcgatgatacaaactggtttgacatgaatcactatcatgttgagacagagcgactgaagagagctcttgggtga

SEQ ID NO: 52 - protein, 141 aa, Oryza sativa
WLRRRCYCFVRSCCCKRDYPVGMEEPAQEQRRLMQIRSKTLLSEVLRGIGANEARYSCRAVADGYVGFAEATVYGARGVGEPFVVRAQGISAIRPCDAEESAAHALISVIKKECSVEFDDTNWFDMNHYHVETERLKRALG

SEQ ID NO: 53 - DNA, 771 bp, Oryza sativa
atggccgacggcggcggccgccgggctcccgggttccgcttctacccgacggaggaggagctgatatgcttctacctccgcaacaagctcgacggcctccgcgacgacatcgagcgcgtcatccccgtcttcgacgtctactccgtcgacccgttgcagctctcagagattcaccacgagatgctgggcggcggcggcgaggagggggagccgtggttctacttctgcccgcggcaggagcgggaggcgcggggcggccggccgagccggaccacgccgtccgggtactggaaggcggcgggcaccccgggggtcgtctactccgccgaccgccggcccatcgggatgaagaagaccatggtgttctaccgcggccgcgcgccgtcgggaaccaagaccgcgtggaagatgaacgagtacagagcattccactaccccgacgcctcctccgcctccgcctccagcgccggcgccgccgcgccaccaaaccatcttcctccgcagctgaggagcgagttcagcctgtgtcgactgtacaccagatcgggaggcatccggcaattcgatcggcggccgctagcgggtggtggtgatgagaacccggggccatccatggctgccgcggcggcgtcacccgaggaaaacgacggatcaggaagttccatgcagcaactggagctgatggatcaaggtggcgccgttgatccggattgggaccagtgggacgacttggccaccttgaccgcacttctgtactggcctagagattag

SEQ ID NO: 54 - protein, 256 aa, Oryza sativa
MADGGGRRAPGFRFYPTEEELICFYLRNKLDGLRDDIERVIPVFDVYSVDPLQLSEIHHEMLGGGGEEGEPWFYFCPRQEREARGGRPSRTTPSGYWKAAGTPGVVYSADRRPIGMKKTMVFYRGRAPSGTKTAWKMNEYRAFHYPDASSASASSAGAAAPPNHLPPQLRSEFSLCRLYTRSGGIRQFDRRPLAGGGDENPGPSMAAAAASPEENDGSGSSMQQLELMDQGGAVDPDWDQWDDLATLTALLYWPRD

SEQ ID NO: 55 - DNA, 348 bp, Oryza sativa
acaggggccaagaagattgctcagattagagataacagcaatttcttccgttcagagcttcagaaaatgggctttgaggttcttggagataatgactcacctgtcatgcctttcatggtctacaatcctgctaaaatgcctgcattctcaagagagtgcctgaagcaaaatgtgagtttttttcaagtgcaccacaaatctattaaaaacctgataaaacaatcttgtccgtttagtaaatctctaatgcaaatttgtctcaaaatagtccaaagttttgtactatttgagttacaccctgtaactcttttttgtgttattaaaaaaaagttttgcagttttaactaa

SEQ ID NO: 56 - protein, 115 aa, Oryza sativa
TGAKKIAQIRDNSNFFRSELQKMGFEVLGDNDSPVMPFMVYNPAKMPAFSRECLKQNVSFFQVHHKSIKNLIKQSCPFSKSLMQICLKIVQSFVLFELHPVTLFCVIKKKFCSFN

SEQ ID NO: 57 - DNA, 1332 bp, Oryza sativa
atgcctcgtccacctgaacctgtgcacgtgctgcttcttgctgccatcgcagtgcaagtgttcgtccggtgcacagcacaagctgcgagtgatcagaagccactagtctccaggctcgccaaggattacaacacctcactctacaccatctccgtcaagaacggcgcgccgccgctcgtcgtcgacctcgccggcgcgctcgtctggtcgacgtgcccgtccacgcactccacggtgccatgccagtccgccgcgtgcgacgcggtcaaccggcagcagcctcgccgctgccggtacgtcgacggcggctggttctgggccggccgcgaaccggggtcgcgctgcgcctgcaccgcccacccgttcaatccggtcaccggcgagtgctccaccggcgatctgacgacattcaccatgtcggcgaacacgaccaacggcaccgacctgctgtacccggagtcgttcaccgccgtcggcgcgtgcgcgccggagcggctgctggcgtcgccgtcgctgccgcaggcggccgccggcgtcgcggggttctccgggacgacgccgctctcgctgccgtcgcagctcgccgcgcagcgccggttcggcagcacgttcgccctgtgcctgccggtgttcgcgacgttcggcgacacgccggtgtacctgcccaactacaacccgtacgggcccttcgactacaccaagatgctccggcgaaccccgttcctgacgaacccgaggaggaacggcggttactacctccccgtaaaacgcatctccgtgtcgtggcgcgggcccggcgacgtcccggtgtccctgcccgccggcgcgctcgacctcaacgcccgcacgggccgcggcggcgtcgtgctcagcaccacgacgccgtacgcgatcatgcgcaccgacgtgttccgcgccttcggcaaggcgttcgacacagtcgtgaccagaggaacggaaagcagaatggcgagggtggccaggcagaagcagttcgagctttgttacggcggcgcaggcgacaccatgttgtcattccctatgatgaagcggacgggcttcgacgcgccggcgatcaccctggagctggacgccggagccacgggtaactggacgatactgaacggcaactacctggtacgcgagacgtgcgttggggtcgtggagatggggccggaaggcatgccggtggacggcgagccggcggtggtgctcggcgggatgcagttggagaacatcctgatggtgttcgatctggacaaacgcacgctcggcttcagcaggctattggaatgggacctgacgaattgttacagcgcaagctttttgtga

SEQ ID NO: 58 - protein, 443 aa, Oryza sativa
MPRPPEPVHVLLLAAIAVQVFVRCTAQAASDQKPLVSRLAKDYNTSLYTISVKNGAPPLVVDLAGALVWSTCPSTHSTVPCQSAACDAVNRQQPRRCRYVDGGWFWAGREPGSRCACTAHPFNPVTGECSTGDLTTFTMSANTTNGTDLLYPESFTAVGACAPERLLASPSLPQAAAGVAGFSGTTPLSLPSQLAAQRRFGSTFALCLPVFATFGDTPVYLPNYNPYGPFDYTKMLRRTPFLTNPRRNGGYYLPVKRISVSWRGPGDVPVSLPAGALDLNARTGRGGVVLSTTTPYAIMRTDVFRAFGKAFDTVVTRGTESRMARVARQKQFELCYGGAGDTMLSFPMMKRTGFDAPAITLELDAGATGNWTILNGNYLVRETCVGVVEMGPEGMPVDGEPAVVLGGMQLENILMVFDLDKRTLGFSRLLEWDLTNCYSASFL

SEQ ID NO: 59 - DNA, 2214 bp, Oryza sativa
atgactggagtagtaccatggatgatccttgcaaccaccctactgctagcaaccatcagcttcagtgcagcatccaggatggctaagcctagatgcagaggaacatgcggcaacctcaccattccctaccccttcggcatcggtgctggttgcttctacactgatgggttcgacgtttcatgcgaggagaaccgcacctacatgcataactcaagcagcaacatggagatctacagcctcaatctgattggagggcaggctcaagtcagcaccttcatcgccgacaagtgctccaacaacacagatggcacttcaacagatggttgggtatcaacatctactgctccttttttcacattatccagcagggctaacaagttaacggtggttggatgcaatacccttgcattcctggggggctacaacgaggaagaacagaacgttggggctgggtgcttctcgatgtgccccgacaagcagagtgtggacagtagcggccagtgctccggcatgggctgttgccagacatctattgcaccaaatctcacctccttaaacgtgacattcgacagcaggttcaacaattctgaggtgaacagcttcaacccatgcagttatgccttcgttgccgagcaagactggttcaggtttgagcctgattacctagaaggtcacaagttcacagacaagtacaaaggggttcccactgtgcttgattgggttgctggaagagaatcatgtgcccaagcgcccaagaacaggacatcatatgcctgtgttagcacgaacagcagctgcatcaactcaccaaatgctaccgggtatctctgtgcctgcaacaatgggtttgcaggcaacccgtacctggaaggagggtgccaagatatcaacgagtgcgaatctccgggtcagtactgccatggaatctgcgacaacacaattgggggctaccattgctactgcgggcctgggactcaaagtacagatccaaagagagagccctgcaatccaataacagcttcagaaagagctagactaacaaaaacgtttataggcatttcggtatgcgctattatactgcttagttgcacttttgcactactgatcgaatgccagaaaagaaagctgatgaaagaaaaagaaaggttctttcaacaaaatgggggtatgctgctgtatgagcaaatccggtcaaagcaagttgatactgtgagaatattcacaaaagaagaactagagaatgcaacagacaattttgactcaagcaaagaactaggaagaggcggtcatggcactgtatacaaggggatcctcaaagacaacagaatagtagccataaagcgctcaaagattatgaatatggttcagaaagatgaatttgtgcaagagatgattatactttcacagatcaaccacaggaatgtggtaaggcttctaggttgttgcttagaagtggaagttccaatgctggtctatgaattcatcccaaatggcactttgttcgagcatatacatggtaaatacagaacaacctccatttcactggatgctcgtctacggattgctcaggaatctgcagaagcactagcatatctacattcatcagcatcccctccaatagttcatggtgatgtcaaatctcccaacattctcctaggtgacaactacataacaaaagtgactgactttggagcatcaaggatgcttccaaaagatgaaatacagtttatgacaatggtacaggggactctaggctacctagacccagaatacttacaagagcgccagctaacacagaaaagtgatgtttatagctttggagttgtgcttctagaactaataacaggaaagactgcaatttattctgaaaatactgaagaaaagaaaagccttgcatcatccttccttctggcactgaaagagaacagacttgagtccatcttggacaggaacatattaggtgttggaacagagctgttccaagatgttgctcaactggcaaaatgctgcttgagtacaaagggggaagaacggccattaatgacagaagtagctgaaaggttaaaagcaataagaagcacctggcgtgagcaattgattgagggtgctaatgaagaaactgtatgtttgcttgaaaattcatcacagtatgacccttctaccactggacgacacggaagcttgatggcgctagatatagaaactggtagatga

SEQ ID NO: 60 - protein, 737 aa, Oryza sativa
MTGVVPWMILATTLLLATISFSAASRMAKPRCRGTCGNLTIPYPFGIGAGCFYTDGFDVSCEENRTYMHNSSSNMEIYSLNLIGGQAQVSTFIADKCSNNTDGTSTDGWVSTSTAPFFTLSSRANKLTVVGCNTLAFLGGYNEEEQNVGAGCFSMCPDKQSVDSSGQCSGMGCCQTSIAPNLTSLNVTFDSRFNNSEVNSFNPCSYAFVAEQDWFRFEPDYLEGHKFTDKYKGVPTVLDWVAGRESCAQAPKNRTSYACVSTNSSCINSPNATGYLCACNNGFAGNPYLEGGCQDINECESPGQYCHGICDNTIGGYHCYCGPGTQSTDPKREPCNPITASERARLTKTFIGISVCAIILLSCTFALLIECQKRKLMKEKERFFQQNGGMLLYEQIRSKQVDTVRIFTKEELENATDNFDSSKELGRGGHGTVYKGILKDNRIVAIKRSKIMNMVQKDEFVQEMIILSQINHRNVVRLLGCCLEVEVPMLVYEFIPNGTLFEHIHGKYRTTSISLDARLRIAQESAEALAYLHSSASPPIVHGDVKSPNILLGDNYITKVTDFGASRMLPKDEIQFMTMVQGTLGYLDPEYLQERQLTQKSDVYSFGVVLLELITGKTAIYSENTEEKKSLASSFLLALKENRLESILDRNILGVGTELFQDVAQLAKCCLSTKGEERPLMTEVAERLKAIRSTWREQLIEGANEETVCLLENSSQYDPSTTGRHGSLMALDIETGR

SEQ ID NO: 61 - DNA, 1248 bp, Oryza sativa
atggtgcagaggccgcgcaaaagggcgcggacgacgtcgccgtgctcgccgccggcgtcgtcgtggcgggacctcccgctggacatcgccggcgaggtcctccgccgcctcccgtcctacgccgaccgcatctgcttcggcgccacgtgccgctcgtggcgcacgtccgcgcgggaacaccgcgcgccgccgccgctgtcgccgtgcctctgcttcgccgacggcagcttccgcggcttcttcccggaggacgcgcggccgttccggctgcccgccgccgccggctggctcggctcctgcggcgagtggctcctgtaccggcgccacgacgacggcgcgtacctgctcgtcgaccccttctccaaggccgccgccatggcgccgctccccagcgtgtcccgtctccatgtccgccacgaccccatcgtcgccgtcgacgagcgagacctgcggtggtgcaggccgacgtggctcccgcgcgagaacaccggcgagccgcaggccgcggcgtccttgctcaagctcgccgtgtccccggccgccgacgtggtggcggcggtggtcggcgaagggaggcacggcaagctcgcggtgtgccggccgggggcgccggcgtggtccgtcagcggcggcgacggctggaggcggatcaaagacacggcgttctaccagggcaagctctacgccgtcgaccacaacgaggacctcctcgccgtgacgctcgccgccgacggcgagccaccggccgtgtcccgcatcgaccgcgtgatcaacggcaagccaccgggggcggccgccctcctccgcgtgacgctgcactacctcgtggactccggcggcgagctgctgctcgttcgccgggaggtccagcgctcgtcgatggtgaggacgcagccgtggcagcacacggcggagctgcaggatcgcttcgccgtgttcagggccgacttccggaggtcgcggtggaggcgggtgaaaaccatcggcgacgagtccggcggccgcgcgctgttcgtcgggcggtggtgctccagggcggtgcgcgtcgccggcgaccggtgggccgatcaggtcttcttcctcgaggacggcaccggcgacgagtggcacacacgggcgcagcgctgctcgctgagggggagcaccttcgggtgcgtgaggccgaatgagctcctgccgttgatgacgacggcggacggccaggatttggatgcgacttggatattccctcgggaggcaaaattgtga

SEQ ID NO: 62 - protein, 415 aa, Oryza sativa
MVQRPRKRARTTSPCSPPASSWRDLPLDIAGEVLRRLPSYADRICFGATCRSWRTSAREHRAPPPLSPCLCFADGSFRGFFPEDARPFRLPAAAGWLGSCGEWLLYRRHDDGAYLLVDPFSKAAAMAPLPSVSRLHVRHDPIVAVDERDLRWCRPTWLPRENTGEPQAAASLLKLAVSPAADVVAAVVGEGRHGKLAVCRPGAPAWSVSGGDGWRRIKDTAFYQGKLYAVDHNEDLLAVTLAADGEPPAVSRIDRVINGKPPGAAALLRVTLHYLVDSGGELLLVRREVQRSSMVRTQPWQHTAELQDRFAVFRADFRRSRWRRVKTIGDESGGRALFVGRWCSRAVRVAGDRWADQVFFLEDGTGDEWHTRAQRCSLRGSTFGCVRPNELLPLMTTADGQDLDATWIFPREAKL

SEQ ID NO: 63 - DNA, 1122 bp, Oryza sativa
atggcgagcggcggcgcattatccccggtggaggagaagcccacggtggtgaagacgaccaaggcggagcagcacgaggaggaggcggcggtggcggtgaagagcgcggcggagatgatgaagaagagcagcccgtgctgcccccggtgcaactccatcaagaccaagttctgctactacaacaactacagcatggcgcagccgcgctacttctgccgcgagtgccgccgctactggacccagggcggctccctccgcaacgtccccgtcggcggcggctgccgcaagagcaagcgctcgtcggcctcgtcggcgtcggcgtcggcggcgtctcctcctgctcctgcggtgggcgccgcgccaccggtggtgccggcgctgtcgtcggcgatcagcaagctgctgcagtcggagcccatggcggcgccgtgcgcggacttccccaacgtgctcccgaccttcgtgtccaccgggttcgagctccccgccgccgccggcgaccgcctctcgctggggtcgttcggggcgttcggcaacctgtcggcggcggtggcggctcccggcggtggtggtgggtcgtcgacgaccacgtcgttcatggacatgctgaggggagttggagggcttttcgacggcgtcggcaacagccatcagatgggcggcaatggcggcggcggaggcagctactacgcgcctctcatcaccggcgccggcaatggcatgctgatgccgccgccgccgctgccgccattttctggttctctgatgcagcatgggatgcaggggctgttcgccaatcatgcgatgggaggaggtggtggtggagtgatgaacgccggcgaggacggcagcgtgatggcggggctgggaggaggccagtggccgccggcgcttggtggtgcagacgagcagcagggcggcggcgacggtggcgaagctgtgatgacgaaggacaccggcggcggcgcatcgtcgtcggcgtcgaggccggactacttctacggctggaacagcgccgccggcggcgtcgtcgctggaggcggcatcggcggcaacgccgccgctgccaccggagcaacgccatggcagggcctcatcgacagcagctcggccatgatgtaa

SEQ ID NO: 64 - protein, 373 aa, Oryza sativa
MASGGALSPVEEKPTVVKTTKAEQHEEEAAVAVKSAAEMMKKSSPCCPRCNSIKTKFCYYNNYSMAQPRYFCRECRRYWTQGGSLRNVPVGGGCRKSKRSSASSASASAASPPAPAVGAAPPVVPALSSAISKLLQSEPMAAPCADFPNVLPTFVSTGFELPAAAGDRLSLGSFGAFGNLSAAVAAPGGGGGSSTTTSFMDMLRGVGGLFDGVGNSHQMGGNGGGGGSYYAPLITGAGNGMLMPPPPLPPFSGSLMQHGMQGLFANHAMGGGGGGVMNAGEDGSVMAGLGGGQWPPALGGADEQQGGGDGGEAVMTKDTGGGASSSASRPDYFYGWNSAAGGVVAGGGIGGNAAAATGATPWQGLIDSSSAMM

SEQ ID NO: 65 - DNA, 1575 bp, Oryza sativa
atggccgtcgacgcgatgttcggcagcgtcgccgtcgcgctgctggcggtggtggtggctgctgcggcgctgcggcggtggaggcggcggcggcggcggggaggcgggaggccgctgccggggcccgtggcgctgccggtggtggggcacctgcacctgttccggaggccgctgcaccgcaccctggcgcgcctcgcggcgcgccacggcgccgccgtgatgggcctgcgcttcgggtcccgccgcgtcgccgtcgtgtcgtcggcgcccgccgccgaggagtgcctcggcccgcacgacctcgcgttcgccaaccggccgcggctgccgtcgggggagatcctggcgtacgagtggtccaccatggggacggccagctacgggccctactggcgccacatccgccgcatcgccgtcaccgagctgctgtccgcgcaccgggtgcagcacttcgccgacgtcaacgtccgcgaggtgcgcgccctggcgcgccgcctctacaggcgggccgccgccgcggccgccgcgggggcgcgcacgcgtgtggagctcaagtcgcggctgttcgagctgctcatgaacaccatgatgtccatgatctgcgagaggaccttctacggcgccgacgacgacgaggtgagcgaggaggcgcggtggttcaggtcggtggtgaaggagacgatggagctgagcggcgcgtcgacggtgtgggacttcctaccagcgccggcgcgctggctggacgccggcaggatgacgcggcggatgcgggagctgtccgacagccggacgaggttcttgcagaggctgatcgacgaccagaggaaggacatggacgccgactccgacgatcacgcgccggcgaagcggcggaccatgatcggcgtcctcctctccctgcagagaaaggaccccgactcgtgccccgaccagctcatccgctccctctgcatcggctccctgcaagccgggacggacacgtcggcggcgaccgtggagtgggcgatgtcgctgctgctgaacaaccccggcgcgatggcgagggctcgcggcgagatcgacgcgtgcgtggggcagccggcggcgcggctactggaggcggccgacctccccaagctgcactacctccggtgcgtcgtgatggagacgctccggctgtacccgccggtgccgctgctggcgccgcacgagtcgtccgccgactgcgtcgtcgccgggttccacgtcccccaggggacgatgctgctggtgaacacgttcgccattcacagggatccccaggtttgggatgaaccagaagccttcatcccagataggtttgcggatggaaaaaacgaagggaagatggtgatcccgtttggtatggggagacggcggtgcccaggagagaatttggggatgcaaatggtaggacttgcccttgggacattgatccagtgttttgattgggaaagggttggggaagagctggttgacatgagggagtgctctggccttacaatgccaaaggagttgcctctcgaggccctctatcaacctcgagcttccatggttgatcttcttacgaagatttag

SEQ ID NO: 66 - protein, 524 aa, Oryza sativa
MAVDAMFGSVAVALLAVVVAAAALRRWRRRRRRGGGRPLPGPVALPVVGHLHLFRRPLHRTLARLAARHGAAVMGLRFGSRRVAVVSSAPAAEECLGPHDLAFANRPRLPSGEILAYEWSTMGTASYGPYWRHIRRIAVTELLSAHRVQHFADVNVREVRALARRLYRRAAAAAAAGARTRVELKSRLFELLMNTMMSMICERTFYGADDDEVSEEARWFRSVVKETMELSGASTVWDFLPAPARWLDAGRMTRRMRELSDSRTRFLQRLIDDQRKDMDADSDDHAPAKRRTMIGVLLSLQRKDPDSCPDQLIRSLCIGSLQAGTDTSAATVEWAMSLLLNNPGAMARARGEIDACVGQPAARLLEAADLPKLHYLRCVVMETLRLYPPVPLLAPHESSADCVVAGFHVPQGTMLLVNTFAIHRDPQVWDEPEAFIPDRFADGKNEGKMVIPFGMGRRRCPGENLGMQMVGLALGTLIQCFDWERVGEELVDMRECSGLTMPKELPLEALYQPRASMVDLLTKI

SEQ ID NO: 67 - DNA, 615 bp, Oryza sativa
atgggaggagctacaaacttacctccaggtttccacttcttcccctcggatgaagagctcgtcgtccatttcctccgtcgcaaggtctccctcctcccatgccaccctgacatcatcccgacgctgcttccgcatcggtacaatccatgggagctgaatggcaaagcactgcaagctgggaaccagtggtacttcttctgccatctaacacaaagtaggacctcatccaatgggcactggagccccattggagttgatgaaacagtaagaagcggcggccgcaatgttggcttgaagaaaacgctgctattctccattggagagccctctgaaggcatcagaaccaactggatcatgcatgagtaccatctgctagacggggattgcgtcgctggcggtagcagcaacttgactagctcgagctctaacaggaggtctcataggaagagaggccactcaagcatggagtccaacaactgggtgctgtgccgagtgttcgaatcgagctgcggttcacaagtgagcttccacggtgagggcaccgagctttcatgcttagatgaggtgtttttgtcactagatgactacgatgaagtaagtttgccgaataaatag

SEQ ID NO: 68 - protein, 204 aa, Oryza sativa
MGGATNLPPGFHFFPSDEELVVHFLRRKVSLLPCHPDIIPTLLPHRYNPWELNGKALQAGNQWYFFCHLTQSRTSSNGHWSPIGVDETVRSGGRNVGLKKTLLFSIGEPSEGIRTNWIMHEYHLLDGDCVAGGSSNLTSSSSNRRSHRKRGHSSMESNNWVLCRVFESSCGSQVSFHGEGTELSCLDEVFLSLDDYDEVSLPNK

SEQ ID NO: 69 - DNA, 249 bp, Oryza sativa
acattagatttgtttttttttcagatgctacttgtggttgggactaaattggagcacattattactgagctagcccatcaggttgctgaaaaacatacagcgattgaaggggagctcgtagtatccccatcagatgagctattttggttccaccgaccaaaaatagtcctcttgttgatccacattgtcttgttccaaaatgcatttgaaattgcatttttcttttggcttctggtaagaacaacataa

SEQ ID NO: 70 - protein, 82 aa, Oryza sativa
TLDLFFFQMLLVVGTKLEHIITELAHQVAEKHTAIEGELVVSPSDELFWFHRPKIVLLLIHIVLFQNAFEIAFFFWLLVRTT

SEQ ID NO: 71 - DNA, 1503 bp, Oryza sativa
atggagaatagccagatgtggcttctgtggggagccctctccgtggcgctcttcttctacttctccaccctgcgacgacgctacgccggcggcaagcccctccccccgggcccgacgccgctgccgctcatcggcaacctacacttggtcggcggcggcacgttccaccacaagctcagggacctggcacgcgtccacggccccgtcatgacgctcaagctcggactcgccaccaacgtggtcatctcctcccgggaggccgccatcgaggcgtacaccaagtacgaccgccacctcgccgcgcgcgccaccccggacaccttccgcgcctgcggcttcgccgaccgctccatggtgttcatcccgagctccgacccgcagtggaaggccctgcgggggatccacgcctcgcacgtcttcaccccgcgggtgctcgccgcggtgcgccccatccgcgagaggaaggtgggcgacctcatcgcctacctccgcgcgcacgccggggaggaggtgctcgtcggccacgccatgtacacgggcatcctcaacatggtgtccttctcctacttctccgtcgacatcgtcgacatgggctcgcagatggcccgcgagctgcgggaggtggtggacgacatcatcttggtggtcgggaagcccaacgtgtccgacttctacccgttcctccggccgctggacctgcagggcctgcgccgctggacgacgaagcggttcaacagggtgttctccatcatgggcgacatcatcgaccgccgtttggctcacatccgcgacaacaagccgaggcacgacgacttcctcgactcaatcctcgagctcatggctgccggcaagatcgatcgtgtcaacgtgctcaacatgttgttcgaggctttcgttgccggggctgacaccatggctcttaccttggagtgggtaatggccgagctgctcaaaaacccgagcgtgatggccaaggcgcgcgccgagctgagggatgtgctcggcgacaaggagatcgtggaggaggccgacgcggcgaggctgccctacctgcaggccgtgctgaaggaggccatgagactgcacccggtgggcgcgctgctgctgccgcacttcgccatggaggacggcgtggaggtcggcggctacgcggtgcccaagggctccacggtgctcttcaacgcgtgggcgatcatgcgcgacgcggcggcgtgggagaggcccgacgagttcgtgccggagcggttcgtggagaggacgccgcagctggacttcagagggaaggacgtggagttcatgccgttcgggtccgggaggcggctgtgccctgggctgccgttggccgagcgtgtcgtgccgttcattctggcgtcgatgctgcacacgttcgagtgggagctccccggcggcatgacggcggaggagttggacgtgtccgagaagttcaagactgccaatgtccttgctgtgcctctcaaggctgtgcctgtcctgatcaaatag

SEQ ID NO: 72 - protein, 500 aa, Oryza sativa
MENSQMWLLWGALSVALFFYFSTLRRRYAGGKPLPPGPTPLPLIGNLHLVGGGTFHHKLRDLARVHGPVMTLKLGLATNVVISSREAAIEAYTKYDRHLAARATPDTFRACGFADRSMVFIPSSDPQWKALRGIHASHVFTPRVLAAVRPIRERKVGDLIAYLRAHAGEEVLVGHAMYTGILNMVSFSYFSVDIVDMGSQMARELREVVDDIILVVGKPNVSDFYPFLRPLDLQGLRRWTTKRFNRVFSIMGDIIDRRLAHIRDNKPRHDDFLDSILELMAAGKIDRVNVLNMLFEAFVAGADTMALTLEWVMAELLKNPSVMAKARAELRDVLGDKEIVEEADAARLPYLQAVLKEAMRLHPVGALLLPHFAMEDGVEVGGYAVPKGSTVLFNAWAIMRDAAAWERPDEFVPERFVERTPQLDFRGKDVEFMPFGSGRRLCPGLPLAERVVPFILASMLHTFEWELPGGMTAEELDVSEKFKTANVLAVPLKAVPVLIK

SEQ ID NO: 73 - DNA, 1557 bp, Oryza sativa
atggaggacaacaagctgatactggctctaggcctatcagtgctgttcgtcctcctctccaagctggtatcatctgccatgaaaccaaggctcaaccttcccccggggccatggacgctgccgctgatcggcagcctccaccacctcgtgatgaagagcccccagatccaccgctcgctgcgcgcgctgtcggagaagcacggccccatcatgcagctgtggatgggcgaggtccccgcggtgatcgtgtcgtcgccggcggtggcggaggaggtcctgaagcaccaggacctcaggttcgccgaccgccacctcaccgccaccatcgaggaggtctccttcggcggccgcgacgtcaccttcgcgccctacagcgagcggtggcgccacctccgcaagatctgcatgcaggagctgctcaccgccgcccgggtgaggtcgttccagggcgtccgagagcgcgaggtggcgcggctcgtgcgtgagctggccgccgacgcgggcgcgggcggcgacgctggcgtgaacctcaacgagaggatcagcaagctcgccaacgacatcgtgatggtgagctccgtcggcggccggtgcagccaccgcgacgagttcctggacgcgctcgaggtcgccaagaagcagatcacgtggctcagcgtcgccgacctgttcccgtcgtccaagctcgcgcggatggtggcggtggcgccacgcaagggcctcgccagccgcaagaggatggagctcgtcataagacggatcatccaagaacggaaggaccagctgatggacgacagcgccgccggcgccggcgaggctgcggcggggaaagactgcttcctcgacgtcctgcttcggctgcagaaggaaggtggcacgccggtcccagttaccgacgaaatcatagtcgtgcttctgtttgacatgtttacaggggctagcgagacatccccaacagtattgatttggatcttggctgaactcatgcggtgtccaagagtaatggcgaaggcacaagctgaggtacgacaagctgctgttgggaagactaggatcacagagaatgatattgttgggctgagctacctcaagatggtgatcaaggaggccttgcgactccattccccggctcccttgctgaaccctcgtaaatgtcgtgagacaacccaagtcatgggctatgatataccaaaaggcacatctgtgtttgtgaatatgtgggcgatatgtagggaccctaattactgggaggatcccgaagagtttaagccagagaggtttgaaaataattgtgtagattttaagggtaataactttgaattccttccatttggctccggacgtagaatttgtccgggtataaaccttgggctagccaacttggagctagcattagctagtcttctctaccattttgactggaagctacccaatggaatgttgcccaaggaccttgatatgcaggagacccccggaatagttgcagctaaactaactactctaaatatgtgccctgttactcagattgctccaagcagcgcagaagatgcatcataa

SEQ ID NO: 74 - protein, 518 aa, Oryza sativa
MEDNKLILALGLSVLFVLLSKLVSSAMKPRLNLPPGPWTLPLIGSLHHLVMKSPQIHRSLRALSEKHGPIMQLWMGEVPAVIVSSPAVAEEVLKHQDLRFADRHLTATIEEVSFGGRDVTFAPYSERWRHLRKICMQELLTAARVRSFQGVREREVARLVRELAADAGAGGDAGVNLNERISKLANDIVMVSSVGGRCSHRDEFLDALEVAKKQITWLSVADLFPSSKLARMVAVAPRKGLASRKRMELVIRRIIQERKDQLMDDSAAGAGEAAAGKDCFLDVLLRLQKEGGTPVPVTDEIIVVLLFDMFTGASETSPTVLIWILAELMRCPRVMAKAQAEVRQAAVGKTRITENDIVGLSYLKMVIKEALRLHSPAPLLNPRKCRETTQVMGYDIPKGTSVFVNMWAICRDPNYWEDPEEFKPERFENNCVDFKGNNFEFLPFGSGRRICPGINLGLANLELALASLLYHFDWKLPNGMLPKDLDMQETPGIVAAKLTTLNMCPVTQIAPSSAEDAS

SEQ ID NO: 75 - DNA, 1038 bp, Oryza sativa
atgcgattagccaggcagcagcagcaggtggtggtggctgcgacgatggagcatgacgtgcaccaccaccggcagatgatgcagcagcagcagcagcaggagatggacctgccgccgggcttccggttccaccccaccgacgaggagctcatcacgcactacctcctccgcaaggccgccgaccccgccgggttcgccgcgcgcgccgtcggagaggccgacctcaacaagtgcgagccatgggacctgccatcgagggcgacgatgggggagaaggagtggtacttcttctgcgtgaaggaccggaagtacccgacggggctgaggacgaacagggcgacggagtccgggtactggaaggcgacggggaaggaccgggagatcttcagggggaaggccctcgtcggcatgaagaagacgctcgtcttctacaccgggagggccccccgcggcggcaagaccggatgggtcatgcacgagtaccgcatccacggcaagcacgccgccgccaattccaaggatcaggagtgggtgctgtgcagggtgttcaagaagagcctcgagctggcgccggcggcggcggcggcggtcggcaggagaggcgcgggcgcggggacggacgttgggccgtcgtcgatgcccatggcggacgacgtcgtcggcctcgccccgtgcgcgctcccgccagcgcacgtgacctgcttctccaacgcgctggagggccagttcctggacacaccgtacctcctccccgccgccgatcccgcggatcacctcgccatgtcctccgcctcgccgttcttggaggccctgcagatgcagtacgtccaggacgccgccgccgccggaggagcgggcatggtgcacgagctgctcatgggcggcggctggtattgcaacaagggcgagagggagaggctgagcggcgcctcgcaggacaccggcctcacgtcgtcggaggtgaaccccggcgagatctcgtcgtcgtcgcggcagcaacgcatggatcatcacgacgcgtccctctgggcctattga

SEQ ID NO: 76 - protein, 345 aa, Oryza sativa
MRLARQQQQVVVAATMEHDVHHHRQMMQQQQQQEMDLPPGFRFHPTDEELITHYLLRKAADPAGFAARAVGEADLNKCEPWDLPSRATMGEKEWYFFCVKDRKYPTGLRTNRATESGYWKATGKDREIFRGKALVGMKKTLVFYTGRAPRGGKTGWVMHEYRIHGKHAAANSKDQEWVLCRVFKKSLELAPAAAAAVGRRGAGAGTDVGPSSMPMADDVVGLAPCALPPAHVTCFSNALEGQFLDTPYLLPAADPADHLAMSSASPFLEALQMQYVQDAAAAGGAGMVHELLMGGGWYCNKGERERLSGASQDTGLTSSEVNPGEISSSSRQQRMDHHDASLWAY

SEQ ID NO: 77 - DNA, 963 bp, Oryza sativa
atggagcaagtcgcgtactggttcatctgcgcatgcgccttcttggctctcgtgctcctcgtcaggctgggcgccgcgcgccgcgacgtcgtgcgcctcccgccgggcccgtggcggctgccggtcgtcggcaacctccaccagctgatgctccggggaccgctcgtccaccgcaccatggcggacctagcgcgcggcctcgacgacgcgccgctcatgcgcctccagctcggcggcgtccccgtcgtcgtcgcgtcgtccgcggacgccgcgcgcgaggtgacgcgcacgcacgacctcgacttcgcgtcgcggccgtggccgcccaccgtgcgccggctgcgcccccaccgcgagggcgtggtgttcgccccctacggcgccatgtggcggcagctccgcaaggtgtgcgtcgtggagatgctcagcgcgcggcgcgtgcggtcgttccgccgcgtgcgcgaggaggaggccgcccgcctcgtcgcgtccatcgcctcgtcgtcgtcctcctcgccgaccggccacgacggcggcgccgcccccgccgtgaacgtcagcgcgccgatcgccgcggccgtggcggacgcgacgatgcgcgccgtgatcggggacaggttcgagaggcgggaggagttcctggagtcgatcacggaggcggtgaggagcttcacggggttcagcctggacgacctgttcccgtcgtcgaggctcgccgccgccgtcggcggcatgacgcgccgcgcggaggccagcatccggaagggccaccagctaatggacagcgccttccgacagcaccagcagctgagggacgccatggctgcgcagccgcatcttgatgattgcgccatggaggaggacctgttggacacgctcctcaggatccagaaggaagacaacctcgacgtgcctctcaccaccggcaacatcaaagccgttctcctggtatgtatacattaa

SEQ ID NO: 78 - protein, 320 aa, Oryza sativa
MEQVAYWFICACAFLALVLLVRLGAARRDVVRLPPGPWRLPVVGNLHQLMLRGPLVHRTMADLARGLDDAPLMRLQLGGVPVVVASSADAAREVTRTHDLDFASRPWPPTVRRLRPHREGVVFAPYGAMWRQLRKVCVVEMLSARRVRSFRRVREEEAARLVASIASSSSSSPTGHDGGAAPAVNVSAPIAAAVADATMRAVIGDRFERREEFLESITEAVRSFTGFSLDDLFPSSRLAAAVGGMTRRAEASIRKGHQLMDSAFRQHQQLRDAMAAQPHLDDCAMEEDLLDTLLRIQKEDNLDVPLTTGNIKAVLLVCIH

SEQ ID NO: 79 - DNA, 816 bp, Oryza sativa
atgaagatccagtgcgacgcgtgcgagagcgcggcggcggcggtggtgtgctgcgcggacgaggcggcgctgtgcgcggcgtgcgacgtggaggtgcacgcggcgaacaagctggccgggaagcaccagcggctgccgctggaggcgctctcggcgaggctcccgcgctgcgacgtgtgccaggagaaggcggcgttcatcttctgcgtggaggaccgcgcgctcttctgccgcgactgcgacgagcccatccacgtccccggcacgctctccggcaaccaccagcgctacctcgccaccggcatccgcgtcggcttcgcctccgcctcgccctgcgacggcggcagcgacgcccatgactccgaccaccacgccccgcccatgggctcctccgagcatcatcaccatcatcagcagccggccccgaccgtcgccgtcgacacgccctcgccgcagttcctgccgcagggctgggccgtcgacgagctcctccagttctccgactacgagaccggcgacaagctgcagaaggagtcgtcgccgccgctcgggttccaggagctggagtggttcgccgacatcgacctgttccacaaccaggcgcccaagggcggcgccgccgccggccggacgacggcggaggtccccgagctcttcgcttcgcaggcggccaacgacgtggcgtactacaggccgccgaccaggaccgccgccgccgccttcaccgcggccaccggcttccgccagagcaagaaggcccgcgtcgagctccccgacgacgaggaggattacctcatcgtccctgatcttggttga

SEQ ID NO: 80 - protein, 271 aa, Oryza sativa
MKIQCDACESAAAAVVCCADEAALCAACDVEVHAANKLAGKHQRLPLEALSARLPRCDVCQEKAAFIFCVEDRALFCRDCDEPIHVPGTLSGNHQRYLATGIRVGFASASPCDGGSDAHDSDHHAPPMGSSEHHHHHQQPAPTVAVDTPSPQFLPQGWAVDELLQFSDYETGDKLQKESSPPLGFQELEWFADIDLFHNQAPKGGAAAGRTTAEVPELFASQAANDVAYYRPPTRTAAAAFTAATGFRQSKKARVELPDDEEDYLIVPDLG

SEQ ID NO: 81 - DNA, 1428 bp, Oryza sativa
atccaacaagttggctatctgaacaatactcaaaattccggagatcacgctacgtccaaccatcacctaacatatctctggatgatggattggtttatgtctacagtgtatttttatggacctgagattaatgtctccaatcgtgtggtgcggaatttttcttctgacatagagaatttccttcgcatttcatttgttgacgaggactgcgagaagctccgtgcaactgatttatccccccgttctgcttcaggacatgatgcaaacagaactgctctgtataagagagttctgtcagtcctttcagatggcatcactattggtggcaagaactttgagtttcttgctttttcttcaagccagctccgagataactctgcatggatgtttgcttctcgccagggattagctgctagcgacattaggacatggatgggggatttccgtaacatcagaaatgtagcaaaatatgctgcaagacttggtcagtcttttagttcctcaaccgaaacattaaaggttcagaagtatgaggtggaagaaatctcagatataaaaaatggtacacagcatgtgttctctgatgggattggaaagatatcatctgcttttgctaatgaagtggccatgaagtgcaacctgaaacgctttgctccttctgcttttcaaataaggtatggtggttataaaggtgttgttgctgttgaccctacatcacgctggaagctttccttaagaaaaagcatgctaaagtttcagtcagacaatatcacagtagatgtccttgcatacagcaagtaccagccaggcttccttaatcggcagctaattactcttctttcgacacttggagttagagatagtgtctttgaacagaagcaagaagaagcagtgaatcagttgaacaaaatggttactgatcctcaagctgctatcgaagcaattgaacttatgcccatgggagaaataacaaatgcagttaaagagctgttgttgtgtggctaccagcctgatgatgaaccatatctttctatgctgctacaaacttttagggcatccaaattactagagctgaaaaccaagtcaaggatattaatcccaaaaggacgagcaatgatgggatgcttggatgaaacacgtacgctgaagtatgggcaagtgttcattcgagctacttcgggtgtaaatgacaatgacaggttcaccgtgacaggaaaagttgtgattgccaaaaacccttgcctccacccaggtgatatacggattctccatgctgttgatgttcctgttttgcaccacatgtttaactgtgtcgtctttccacagcaaggaccaaggccgcatcctaatgagtgttcagggagtgatcttgacggggacatatattttgtttcttgggacccatctctcattccgcctcgtatggtg

SEQ ID NO: 82 - protein, 476 aa, Oryza sativa
IQQVGYLNNTQNSGDHATSNHHLTYLWMMDWFMSTVYFYGPEINVSNRVVRNFSSDIENFLRISFVDEDCEKLRATDLSPRSASGHDANRTALYKRVLSVLSDGITIGGKNFEFLAFSSSQLRDNSAWMFASRQGLAASDIRTWMGDFRNIRNVAKYAARLGQSFSSSTETLKVQKYEVEEISDIKNGTQHVFSDGIGKISSAFANEVAMKCNLKRFAPSAFQIRYGGYKGVVAVDPTSRWKLSLRKSMLKFQSDNITVDVLAYSKYQPGFLNRQLITLLSTLGVRDSVFEQKQEEAVNQLNKMVTDPQAAIEAIELMPMGEITNAVKELLLCGYQPDDEPYLSMLLQTFRASKLLELKTKSRILIPKGRAMMGCLDETRTLKYGQVFIRATSGVNDNDRFTVTGKVVIAKNPCLHPGDIRILHAVDVPVLHHMFNCVVFPQQGPRPHPNECSGSDLDGDIYFVSWDPSLIPPRMV

SEQ ID NO: 83 - DNA, 1314 bp, Oryza sativa
atgccaagttgccgagctaggatgcacgcgcaccagcaccagcacgcgctgctcgcggcgctcctcgcgtgcgcgctcgcggcgtcgtcgtcgacggccggagcgcagccggcggggcagcaggggtatgcctacggcgacgtgtccgggcagcaggtgcacgtcagcacgacgatgatcgtgctgctggccgccgtcgtcggggttttcctgttcatcgcgatctccaccatctacctccgccactgcaccggttacgaccccgcgacggagggcggcggcgtcggcgggagccgttccatgatcctccctgccaacagcttcgtctcgaggcggcagcggcggccgcgcgggctcgactcgtcggtggtccggatgttccccaccatgaagtacgccgaggcgaaggcgctgcgggtggggaaggtcgccggcgccgcgctggagtgcgcggtgtgcctcagcgagttcgaggacgacgagatgctcaggttcctgcccaagtgcagccacgccttccacccggactgcatcggccagtggctcgccagccacgtgacctgccccgtctgccgccgcaatctcgaccctaacaaggacaccaccgaagaggtgatcatcccggccgccgccgccgccgatccgaacagcacctccagtgaaatagttgtgatacggcaagaagacggggcgcacccagcagccgtggtgatcgacgtggtcaccgaggaggacgacgaggagcggaggaaggaggagctagagcttcaggcgataggcacccagctccgcgcgatgcggtcacggtcggggctgcggccaaagacgtcggcggcgaagcttccccggtcgcactccactggccactccctcgccgtccggctcgacggcgacctagagcggtacacgctgcggctgccggagcacgtacacagggagatggtcgcggcgggggagcagagcgtgcgccgcgggaggagactcggggaaggggtcggcatgggcgctcggtgcagcccccggttttcgcggtcgggcagatggtcatcttttctctcaaattctttgtcaggaaagctgtctttcctctccccgtcgtcgaggagaacgccggatagcacccaggtggaagtgtcatcatcctcgtcgtcgtcggtgacgaaggtgaaagggaagcgcgtggccgccgtcgatgttgccgacgacggttctgctcatgggactgcacagtaccctggttgcactgtggccagctcggcggcggcggcggctgtggacgtggagaaggcagctaccaggcaagttcgaacatag

SEQ ID NO: 84 - protein, 437 aa, Oryza sativa
MPSCRARMHAHQHQHALLAALLACALAASSSTAGAQPAGQQGYAYGDVSGQQVHVSTTMIVLLAAVVGVFLFIAISTIYLRHCTGYDPATEGGGVGGSRSMILPANSFVSRRQRRPRGLDSSVVRMFPTMKYAEAKALRVGKVAGAALECAVCLSEFEDDEMLRFLPKCSHAFHPDCIGQWLASHVTCPVCRRNLDPNKDTTEEVIIPAAAAADPNSTSSEIVVIRQEDGAHPAAVVIDVVTEEDDEERRKEELELQAIGTQLRAMRSRSGLRPKTSAAKLPRSHSTGHSLAVRLDGDLERYTLRLPEHVHREMVAAGEQSVRRGRRLGEGVGMGARCSPRFSRSGRWSSFLSNSLSGKLSFLSPSSRRTPDSTQVEVSSSSSSSVTKVKGKRVAAVDVADDGSAHGTAQYPGCTVASSAAAAAVDVEKAATRQVRT

SEQ ID NO: 85 - DNA, 519 bp, Oryza sativa
atgacggagctgttcgacaccgccgtgaccagcctcctccacctgccggaggtgctcgaccgcctcggcgccgccgccggggaccgccgctcggcgggcgaccacgcgcaccacgccgcgcatggacacggccagcaccgcatcagtggaatcggtggtggcgcgccagtggacatcatggagacccccggcgagtacgcgttcgtgctcgacgtccctggcctctccaagtccgacatccaggtgacgctggaggaggacagggtgctggtgatgaagagcagcaatggcgccgggaacgggaagcggaagcgggaggaggaggaaggggagtgcaagtacatccgcctcgagcgccgcgcgtcgccgagggcgttcgcgcgcaagttccgcctcccggaggacgcggacaccggcggcatctcggcgcgatgcgagaacggggtgctcacggtcaccgtcaagaagcggccgccgccggagaagaagaccaagtccgtccaggtcaccatcgcctga

SEQ ID NO: 86 - protein, 172 aa, Oryza sativa
MTELFDTAVTSLLHLPEVLDRLGAAAGDRRSAGDHAHHAAHGHGQHRISGIGGGAPVDIMETPGEYAFVLDVPGLSKSDIQVTLEEDRVLVMKSSNGAGNGKRKREEEEGECKYIRLERRASPRAFARKFRLPEDADTGGISARCENGVLTVTVKKRPPPEKKTKSVQVTIA

SEQ ID NO: 87 - DNA, 255 bp, Oryza sativa
atgtcgtccaattttgaggccaacaacaacaacaatggcgagaagcagctggtctgtgtgaccggagcaggtggcttcattgggtcgtgggtggtgaaggagctcctcatccgtggctaccacgtcaggggaacagccagggatcctgctgacagcaagaatgctcacctgcttgagctggagggagccgacgagaggctctccctctgccgcgccgacgtcctcgacgccgccagcctccgcgccgccttcagc

SEQ ID NO: 88 - protein, 338 aa, Oryza sativa
MSSNFEANNNNNGEKQLVCVTGAGGFIGSWVVKELLIRGYHVRGTARDPADSKNAHLLELEGADERLSLCRADVLDAASLRAAFSGCHGVFHVASPVSNDPDLVPVAVEGTRNVINAAADMGVRRVVFTSSYGAVHMNPNRSPDAVLDETCWSDYEFCKQTDNLYCCAKMMAEMTATEEAAKRGLELAVVVPSMTMGPMLQQTLNFSTNHVARYLMGTKKSYPNAVAAYVDVRDVARAHVLVYERPEARGRYLCIGTVLHRAELLRMLRELFPRYPATAKCEDDGKPMAKPYKFSNQRLKDLGLEFTPLRKSLNEAVLCMQQKGHLPLIYPVPKRAYL

SEQ ID NO: 89 - DNA, 1737 bp, Oryza sativa
atggagcagcttcccaagcgcccggcgaactacgtgccactgagccctgtggggttcctgccgcgcgccaatgccgtctacggcgaccgcacctccgtcatctacggccgcgtccgcttcacctggagccagacctacgcccgctgccgccgcctcgcctcctccctcctctccctcggcgtccgcaaccacgacgtcgtgtcggttttggcgccgaacgtgccggcaatgtacgagatgcacttcgcggtgccgatggccggggcggtgctcaacaccatcaacacgcggctcgacgcgagggcggtggcgggcatcctgcggcactccgaggccaaggtgttcttcgtcgactaccagtacgtgcgcctcgccagcgacgcgctccagatcgtcgccgacgaggggaggcacgtcccgctcgtcgccgtcatcgacgacattgacgtgcccaccggcgtccgcctcggcgagctcgagtacgaggggctggtcgcccgtggcgaccccgccgccgagctgcccagcctcgccgacgagtgggacgccgtcacgctcaactacacgtcgggcaccacgtcggcgcccaagggcgtggtgtacagccaccgcggcgcgtacctgagcaccatgagcttgctcatgtcgtgggtcgtcggcgacgagccggtgtacctgtggacgctgcccatgttccactgcaacgggtggaccttcacctggggcatggcagcgcgcggcggcgtcaacgtctgcatccgcgacgcgcgcgccgcggacatctaccgcgccatcgcgcgccacggcgtcacccacctgtgctgcgcgccggtggtgttcaacatcctgctcgagggcggcgaggcggcggcgaagcagctcgcggccccggtccacgtgctcaccggcggggcgccaccgccggccgccctcctcgagcgcgtcgagcggatcggcttccgcgtgacgcacgcgtacgggctcaccgaggccaccggcccggcgctggcgtgcgagtggcgcgcgcagtgggaccgcctgccgctgccggagcgcgcgcggctcaagtcccggcagggcgtcagcgtcctgtccctcgccgacgccgacgtcaaggacgccaagacgatggcgagagtgccgcgcgacggcaagaccgtcggcgagatcgtgctccgcggcagcagcatcatgaagggctacctcaacaacccggaggcgaacagcgacgccttcaagggcgagtggttcctgaccggcgacgtcggcgtcgtgcacgccgacggctacatcgagatcaaggacaggtccaaggacgtgatcatcagcggcggcgagaacatctgcagcaaggaggtggaggaggtgctgttccagcaccccgccgtcgccgacgcggcggtggtcgccatgccgcacccgcactggggcgagacgccgtgcgcgttcgtcgtggcgagggacaaggcggccggggtgtgcgaggacgacgtcgtcgcgttctgccgcaagcacatggcgcggttcatggtgcccaagaaggtggtcgtctacgacgccatcccgaggaacggcaacggcaaggtcgagaagaacttgctccgggaggcggccaagaagctggcgccggcggccgtgccggcgcagaagacgaaggtgaagacgacgacgacgacggtcggcggccgccgcggcgagcacccggtggcgcatgtcatggccgtgtcaaggctttag

SEQ ID NO: 90 - protein, 578 aa, Oryza sativa
MEQLPKRPANYVPLSPVGFLPRANAVYGDRTSVIYGRVRFTWSQTYARCRRLASSLLSLGVRNHDVVSVLAPNVPAMYEMHFAVPMAGAVLNTINTRLDARAVAGILRHSEAKVFFVDYQYVRLASDALQIVADEGRHVPLVAVIDDIDVPTGVRLGELEYEGLVARGDPAAELPSLADEWDAVTLNYTSGTTSAPKGVVYSHRGAYLSTMSLLMSWVVGDEPVYLWTLPMFHCNGWTFTWGMAARGGVNVCIRDARAADIYRAIARHGVTHLCCAPVVFNILLEGGEAAAKQLAAPVHVLTGGAPPPAALLERVERIGFRVTHAYGLTEATGPALACEWRAQWDRLPLPERARLKSRQGVSVLSLADADVKDAKTMARVPRDGKTVGEIVLRGSSIMKGYLNNPEANSDAFKGEWFLTGDVGVVHADGYIEIKDRSKDVIISGGENICSKEVEEVLFQHPAVADAAVVAMPHPHWGETPCAFVVARDKAAGVCEDDVVAFCRKHMARFMVPKKVVVYDAIPRNGNGKVEKNLLREAAKKLAPAAVPAQKTKVKTTTTTVGGRRGEHPVAHVMAVSRL

SEQ ID NO: 91 - DNA, 804 bp, Oryza sativa
cagtacagaatttgtaagttgttgatttgcgccatgagaaggcttctcccgctcgccggcgccacgctgctgatcgcggcggccggcggcgccagcgggcagcaggcgggtgttgggtcgatcatcacgcgggcgatgttcgagtcgatgctgagccaccgtggggaccaaggttgccagggcgccttctacacctacgacgcgttcatcaaggccgccggagatttccctagattcggcacgaccggcaacgacgaaacgcgccggcgcgagctcgccgctttctttggccagacctcccacgaaactacaggtggatgggcaactgctcctgatggaccctttgcttggggatactgccgggtgaacgagatcacgccgtcggacccgccctactacggccgaggacccatacagcttactcataagtacaactaccagctagccggggacgcgttgggtctggacctggtgaacaaccccgacctggtgtcaagcgaccccgtggtggcgttcaggacggccatctggttctggatgacggcgcagtcacccaagccgtcgtgccacgacgtaatcaccaaccagtggacgccgtccggcgatgaccgtagctccgggaggctccccggctacggcatggccaccaacatcatcaacggcggtgaagagtgcggcaagggctactccaccgacaacgccaaggaccgggtcggctactacaagaggtactgcgacatgttccgcgtaggatacggagataacatagcctgcagggaccagaagccctacggaggaggttaa

SEQ ID NO: 92 - protein, 267 aa, Oryza sativa
QYRICKLLICAMRRLLPLAGATLLIAAAGGASGQQAGVGSIITRAMFESMLSHRGDQGCQGAFYTYDAFIKAAGDFPRFGTTGNDETRRRELAAFFGQTSHETTGGWATAPDGPFAWGYCRVNEITPSDPPYYGRGPIQLTHKYNYQLAGDALGLDLVNNPDLVSSDPVVAFRTAIWFWMTAQSPKPSCHDVITNQWTPSGDDRSSGRLPGYGMATNIINGGEECGKGYSTDNAKDRVGYYKRYCDMFRVGYGDNIACRDQKPYGGG

SEQ ID NO: 93 - DNA, 1803 bp, Oryza sativa
atggcggtgaccgagagcttgccgttgccggccatggagaacggcgagggtaagggaggcggcgagtacacgcaggacgggtcggtggatctccggggaaaccccgtgctccgttccaagagaggcggctggaccgcctgctccttcatcgtagtgtacgagttgttcgagaggatggcgtactacgggatagcgtcgaacctggtgatatacctgacggacaagctccaccaggggacggtggaggcgtccaacaacgtcacgaactggtccggcgccgtcttcatcatgcccttgctcggagcctacgccgccgacgcctacctcggccgctactggaccttcgtcgccggctccgccatatacttcttggggatgtgtttgctgacgctggccgtgaccattccgtcgctgaagccaccgccgtgcgccggcggcgtgtgcccgccggcgtcggccctgcagctgggcgtctacttcggcggcctgtacatcatcgcgttcggcaatggcggcaccaagcccaacatctcgaccatcggcaccgaccagttcgacgagttcgacccccgggagaagatgcacaagatgtccttcttcaactggtggatgttcaccatcttcgtcggcatcctcttctcctccaccgtcctcgtctacctccaggacaatgtcagctggtccgtcggctatggcatccccacgctgggcctcctcgtctccatctccatcttcctcgccggcacgccgctgtaccgccacaaggtgccgcagggcagcccgttcacccgcatgggcaaggtcgtcgccgccgccgtctggaagtggcgcgtggccgtgccggcggacgccaaggagctgcacgagctggagctcgaggagtacacgaggaagcgcaagttcaggatggactccaccaacgccatgaggttcctaaacaaggccgccgtgaaggaggacggctcgccggcggcgaggtggagcctgtgcacggtgacccaggtggaggagacgaagcagatcgtcaaggtgatccctctgctggcgaccatgttcgtgccgtgcacgctcatcgcgcagacgaacaccctattcgtgaagcagggcaggacgatggaccgccacatcgggcgccacttccagatccctccggccagcctcggcgcgttcgtcaccctgagcatgctcgtcgccgtcgtggtgtacgaccggctgttcgtcccggccatccggaagtacaccaagaacccgaggggcatcacgctgctgaagcggatgggcgtcgggctgctgctgcaggtggtggcgatggcgacggcgtcgctgatggagagccggcggctggggtacgcgcggcggcacgggctggacgccgccgccgcggaggttcccgtgccgctcaccatcttcgagctgctgccgcagtacgtgctgatgggggtggcggacgcgttcctggtggtgggcaagatcgagttcttctacgaccaggcgccggagagcatgaagagcctcggcacggccatgtcgctgacggcgtacggcgtcggcaacgtgctcagcagcttcctcctctcgctcgtgtcgcgcgtcacgcgggagcggggcgacgcctgggtcaccaacaacctcaacgcctcgcacctcgactactactacggcttcctcactgtcctcggcgccatcaacgccgtcgtcttcgtcgcgctcagcagcaggtacaggtacaaggtcgagtcgacggagacgatcgacatcgccgtggacgtgaagggtgacacagccaaaaagattcagaactga

SEQ ID NO: 94 - protein, 600 aa, Oryza sativa
MAVTESLPLPAMENGEGKGGGEYTQDGSVDLRGNPVLRSKRGGWTACSFIVVYELFERMAYYGIASNLVIYLTDKLHQGTVEASNNVTNWSGAVFIMPLLGAYAADAYLGRYWTFVAGSAIYFLGMCLLTLAVTIPSLKPPPCAGGVCPPASALQLGVYFGGLYIIAFGNGGTKPNISTIGTDQFDEFDPREKMHKMSFFNWWMFTIFVGILFSSTVLVYLQDNVSWSVGYGIPTLGLLVSISIFLAGTPLYRHKVPQGSPFTRMGKVVAAAVWKWRVAVPADAKELHELELEEYTRKRKFRMDSTNAMRFLNKAAVKEDGSPAARWSLCTVTQVEETKQIVKVIPLLATMFVPCTLIAQTNTLFVKQGRTMDRHIGRHFQIPPASLGAFVTLSMLVAVVVYDRLFVPAIRKYTKNPRGITLLKRMGVGLLLQVVAMATASLMESRRLGYARRHGLDAAAAEVPVPLTIFELLPQYVLMGVADAFLVVGKIEFFYDQAPESMKSLGTAMSLTAYGVGNVLSSFLLSLVSRVTRERGDAWVTNNLNASHLDYYYGFLTVLGAINAVVFVALSSRYRYKVESTETIDIAVDVKGDTAKKIQN

SEQ ID NO: 95 - DNA, 492 bp, Oryza sativa
atgattccgagagctccgagcctcttccatatcgaggatggagctgtgggtgtcgcggcgtcgacgaagaagccaatgccggctgactccggcgagctcgtcgggctccggctgatcatacagcagtcgccgaggcaacggccgccgctgtccgtgctcaggcggtcggcggtgaggccgtcgccggcggcgacggcggcggcgagtcaggatgaggctggtgctcctgcaggccgggggttcatggggttggggttcttgaactgctgctactgctgccacaagaagctctacgccgacatggatgtgttcgtctacaaaggggagcacgcgttctgcagcgcggaatgccggagccagcagatggcgagggaggagaggcgagagatcgagatgctggtgaggcggcgccgcgacgcgttccaccgccggcgagcttcgccgccggccaagatcggtggacacgcgaggctgcagatcgctgcttcatga

SEQ ID NO: 96 - protein, 163 aa, Oryza sativa
MIPRAPSLFHIEDGAVGVAASTKKPMPADSGELVGLRLIIQQSPRQRPPLSVLRRSAVRPSPAATAAASQDEAGAPAGRGFMGLGFLNCCYCCHKKLYADMDVFVYKGEHAFCSAECRSQQMAREERREIEMLVRRRRDAFHRRRASPPAKIGGHARLQIAAS

SEQ ID NO: 97 - DNA, 486 bp, Oryza sativa
atgtcgctgatccgccgcagcaacgtgttcgaccccttctccctcgacctctgggaccccttcgacggcttccccttcggctccggcagcagaagcagcggcagcatcttcccgtccttcccccgcggcacctcctccgagaccgcggccttcgccggcgcgcgcatcgactggaaggagacgccggaggcgcacgtgttcaaggcggacgtgccggggctgaagaaggaggaggtcaaggtggaggtggaggacggcaacgtcctccagatcagcggcgagcgcagcaaggagcaggaggagaagacggacaagtggcaccgcgtggagcgcagcagcggcaagttcctccgcaggttccggctgccggagaacaccaagccggagcagatcaaggcgtccatggagaacggcgtgctcaccgtcaccgtgcccaaggaggagcccaagaagcccgacgtcaagtccatccaggttaccggctag

SEQ ID NO: 98 - protein, 161 aa, Oryza sativa
MSLIRRSNVFDPFSLDLWDPFDGFPFGSGSRSSGSIFPSFPRGTSSETAAFAGARIDWKETPEAHVFKADVPGLKKEEVKVEVEDGNVLQISGERSKEQEEKTDKWHRVERSSGKFLRRFRLPENTKPEQIKASMENGVLTVTVPKEEPKKPDVKSIQVTG

SEQ ID NO: 99 - DNA, 1707 bp, Oryza sativa
atgtgggcgcgcttctggtattccaagccggccgagagggcgcggccggcggcgttcgtgcccccgccgccaccgccgacgccgcctcagtacgtgcctcccgaagagccgtcggccttcgcgaagctctacgccgtcgctggcgacgtggtcggccgcgccaaggctctcctgaccaccggtggacctgtcacgccctccgacgacgggcagagagtccgccgtgccttggcccagctcacggccccgccttccgacccggcgcccgcggcaccgcagaaggactcgagctcgggcttgagctctacggcggtggtctggatcatagtggcggccggcgtcgtcggggcggttttggctctgtgcgtgctcacgctttggatccgtcgatgccggcggcagcgcaggcggcggcggcaggcccagccttttccgctaccaccgccaatatacaaccccaacccctactacaaaggtgaccttccgccgcagccattcgttgcgcagcaaccgccgtcggaccactacttcattcagcaccagcacccgacgccgccgcagaccagcggcacgttctccgacgccggctccgagcgcccgcactccatcgacatcctcaccgagctgcccaccggcggctcgctctcgtacgaccagctggccgccgcgacggacgggttctctcccgacaacgtcatcgggcagggcggcttcgggtgcgtgtacagggggacgctgcaggatggcaccgaggtggcgatcaagaagctcaagacggagagcaagcagggcgaccgcgagttccgcgccgaggtggagatcatcactcgcgtgcaccacaggaacctcgtctcgctcgtggggttctgcatctccggcaacgagaggctgctggtttacgagtttgtccccaacaagacgctcgacacgcatttacacgggaacaaggggccacctctggattggcagcaaagatggaaaatcgctgtggggtctgcaaggggtttggcctatctacacgatgactgttctcctaaaattatacatcgtgatgtcaaggcatccaatattctgctggatcatgattttgagcccaaggttgcagattttggtctagcaaagtatcaaccaggaaaccacactcacgtttccacaagaataatgggcacatttgggtacatagctccagagtttttgtctagcgggaaacttactgacaaagccgatgtctttgcttttggtgtcgtcctcttggaactgataactggaaggctgccggttcagtcatctgagtcttacatggatagcacgttagttgcttgggcgaaacccttgctttccgaagctacggaggaaggcaactttgatatccttgttgatccagatattggagatgattatgatgaaaacataatgatgcgaatgatcgagtgtgccgccgctgccgtgcgccaatcagcacatctgcgtccatccatggttcagatcctgaagcacttgcaaggagaaacgcacggagaagatctaaactctatatttaggataacgtacgcagaagatacatacagttccatcatggaatccggtgagtccatcgggccacgatcacgaagggcgccgcggagtcagagaaacactagcagcgattacagcagtgaacaagctcttacagacaaagccaaccgaagccccgctaagggcaggtga

SEQ ID NO: 100 - protein, 568 aa, Oryza sativa
MWARFWYSKPAERARPAAFVPPPPPPTPPQYVPPEEPSAFAKLYAVAGDVVGRAKALLTTGGPVTPSDDGQRVRRALAQLTAPPSDPAPAAPQKDSSSGLSSTAVVWIIVAAGVVGAVLALCVLTLWIRRCRRQRRRRRQAQPFPLPPPIYNPNPYYKGDLPPQPFVAQQPPSDHYFIQHQHPTPPQTSGTFSDAGSERPHSIDILTELPTGGSLSYDQLAAATDGFSPDNVIGQGGFGCVYRGTLQDGTEVAIKKLKTESKQGDREFRAEVEIITRVHHRNLVSLVGFCISGNERLLVYEFVPNKTLDTHLHGNKGPPLDWQQRWKIAVGSARGLAYLHDDCSPKIIHRDVKASNILLDHDFEPKVADFGLAKYQPGNHTHVSTRIMGTFGYIAPEFLSSGKLTDKADVFAFGVVLLELITGRLPVQSSESYMDSTLVAWAKPLLSEATEEGNFDILVDPDIGDDYDENIMMRMIECAAAAVRQSAHLRPSMVQILKHLQGETHGEDLNSIFRITYAEDTYSSIMESGESIGPRSRRAPRSQRNTSSDYSSEQALTDKANRSPAKGR

SEQ ID NO: 101 - DNA, 1077 bp, Oryza sativa
atgtctgaggtgtccgttatggccgaggtggaggagacggcggcggcggcgccgctggacctgccgccggggttcaggttccaccccaccgacgaggagatcgtctcgcactacctcacccccaaggccctcaaccaccgcttctcctccggcgtcatcggcgacgtcgacctcaacaagtgcgagccatggcacctcccagccatggcgaagatgggggagaaggagtggtacttcttctgccacaaggaccgcaagtacccgaccgggacgaggacgaaccgggcgacggagagcggctactggaaggccaccggcaaggacaaggagatcttccgcgggaggggcatcctcgtcggcatgaagaagacgctcgtcttctacctcggccgcgcgccccgtggcgagaagaccggctgggtgatgcacgagttccgcctcgagggcaagctccccagccagctcccgcgctccgccaaggaccagtgggcggtgtgcaaggtgttcaacaaggagttggcgctggcggcgaagaacgggccaatggcggtgaccgaagcgaccgccgacgacgcggggatcgagcgggtcggctcgttcagcttcctcagcgacttcatcgaccccgccgagctgccgccgctgatggacccttccttcgtcgccgacatcgacggggtggacgacgccaaggtgtccgcgtcgacctccgggcaggccgcgatcgccgccggcttccatgtcgcgtcgcaggtcatgagctaccagcaggtcaagatggaagagccgttgccgctgccgtacctgcaccagcagccgccgcggatgctgcactcgggtcagtacttctcgctcccggcggtgcaccccggcgacctgacgccgtcggcgatccggaggtactgcaaggcggagcaggtctcggggcagacgtcggcgctcagcgcctcgcgcgacaccgggctcagcaccgaccccaacgccgccggctgcgcggagatctcgtcggcgccgacgtcccagccgttcccggagttcgacgacgggattctgggcctcgacgacttctggaactaa

SEQ ID NO: 102 - protein, 358 aa, Oryza sativa
MSEVSVMAEVEETAAAAPLDLPPGFRFHPTDEEIVSHYLTPKALNHRFSSGVIGDVDLNKCEPWHLPAMAKMGEKEWYFFCHKDRKYPTGTRTNRATESGYWKATGKDKEIFRGRGILVGMKKTLVFYLGRAPRGEKTGWVMHEFRLEGKLPSQLPRSAKDQWAVCKVFNKELALAAKNGPMAVTEATADDAGIERVGSFSFLSDFIDPAELPPLMDPSFVADIDGVDDAKVSASTSGQAAIAAGFHVASQVMSYQQVKMEEPLPLPYLHQQPPRMLHSGQYFSLPAVHPGDLTPSAIRRYCKAEQVSGQTSALSASRDTGLSTDPNAAGCAEISSAPTSQPFPEFDDGILGLDDFWN

SEQ ID NO: 103 - DNA, 1311 bp, Oryza sativa
atggtcgccgtcgctcgtcctgctgcttccgccgcatccaatgaaatggtttgtgggatatgtggcagcggtcatgaccaagatagaatggcaaaatgtattcggtgcaatgtctatcaacattgttattgcttcccagtggtgacatatgatgttcctgatgaatggtgttgttgtgagtgccaaaacaagtccaattgggaccaaactcctagtcaaggtgggcaaactatcaggaatagagtccatcaagatagcctgaaaattccaaacaagtttgaaaatgccaaagtgaaatacatttcttatgaagaggtgtcattattgaataataatgagagaccaccaaattgtaggtcaaattttcatgtgcgacgtacaaatagtcatgtccgtcctgcatctcctccaaatgcgaaacagtcatctagtaggagtgacaatcgtgcttatagccagttccatcggaaatttccaaatgggcagcagtccccctgtaggagtgacactcaagggccttttctgaaacgaggtgatggtgcaagtcagaaccagacagagattgctggtataaacatgaaacagaaagcacaatcaggtgagatgcttcgtccatgtcatagaagcagagcaattagaggaaaaattgactttcaggttcaaaatgagcagagggaaaagaaggtagttagtgcagataaagtaacaatgaacccccagagtcgggatgatcctagagaaaagagtggatccaatgttacaggtactgatattggacgtggatctgaaatgagtccggacaatgatataggcatgctggtggtcattaattcaagtgtggaatatgcaagacaacctccaccagaaatttgttggacgggatgctttcttgtctccaatggatcaaactgtaatcctgctgattttaaagcttactgcccatcaaaagtgtcgtctaaagttctcaatgtcatcaagagcatgcctagtataatagagttggatatattgcctcgaatggatgaatggccaaaatcttttgagataaatccaccagtttatgaagacattggcctgttcttcttctccactgaacttgaccggaatggaaagagtcaatctcatgtcatggagacgagctgcaattttgttatgagggcatatatcaacaatataaagttgctgatatattcctcagaagtgcttccacctgattcccagtggattgatggagagagctacttatggggtgtctttgtggatcccaagaggaggcataagtctatgccatttggttccatttctgcatga

SEQ ID NO: 104 - protein, 436 aa, Oryza sativa
MVAVARPAASAASNEMVCGICGSGHDQDRMAKCIRCNVYQHCYCFPVVTYDVPDEWCCCECQNKSNWDQTPSQGGQTIRNRVHQDSLKIPNKFENAKVKYISYEEVSLLNNNERPPNCRSNFHVRRTNSHVRPASPPNAKQSSSRSDNRAYSQFHRKFPNGQQSPCRSDTQGPFLKRGDGASQNQTEIAGINMKQKAQSGEMLRPCHRSRAIRGKIDFQVQNEQREKKVVSADKVTMNPQSRDDPREKSGSNVTGTDIGRGSEMSPDNDIGMLVVINSSVEYARQPPPEICWTGCFLVSNGSNCNPADFKAYCPSKVSSKVLNVIKSMPSIIELDILPRMDEWPKSFEINPPVYEDIGLFFFSTELDRNGKSQSHVMETSCNFVMRAYINNIKLLIYSSEVLPPDSQWIDGESYLWGVFVDPKRRHKSMPFGSISA

SEQ ID NO: 105 - DNA, 2391 bp, Oryza sativa
atgggcgccgtcctcggcgacccgcgccgcccgctcctcctctccgtccgctccggcgccgccgtctccatgcccggcatgatggacaccgtcctcaacctcggcctcaacgaccacgtcgtcgccggcctcgcccaccgcagcggcgagcgcttcgcctacgactcctaccgccgcttcctcgacatgttcggcaacgtcgttatggacataccgcattcactatttgaggagaaaattgaagccatgaaagcagctttaggtttgaggaatgacaccgagttgactgccagggatttgaaagaacttgttgctcaatataagaatgtttatgtggaggccaaaggtgaagaatttccctcagatccaaagaagcagctgcatttatctgtgttggctgttttcaactcatgggacagcgcaagggcaaagaagtacagaagcattaaccagatcactgggttaaagggtactgctgtgaatgttcagtgcatggtctttggcaacatgggtgacacttcaggcactggtgttctctttactaggaaccctagtactggagagagaaaactttatggtgaattccttgtcaatgctcagggtgaggatgtggttgctggaatcagaactccacaagatcttgataccatgaaggattgcatgccagagccttatgcagaactagttgagaattgcaaaatcttggaaagccactacaaagaaatgatggatattgagttcactgttcaagaaaatagactttggatgctgcaatgcagaacagggaagcgcacaggcaaaggtgctgtgaagattgctgtagacatggtcaatgagggactgattgaccggcgttcagcaattaagatggtggaaccacggcacttggaccagcttcttcatccccagtttgagagcccgtcgtcatatggagacaaagttattgctacaggcttgcctgcatcaccaggagctgctgtaggccagattgtcttcacagctgacgatgctgaagcatggcatgcacaaggaaaatctgtcattctggtgaggactgaaacaagcccagaggatgttggtggcatgaatgcggctgctggaattcttacagccagaggtggtatgacatctcatgcagcagtcgtagcccgtggatggggaaaatgttgtgtggcaggatgctcgggtatccgtgtaaatgatgctgagaaggtggtactggttgccgacaaggtgctttgtgagggtgaatggttgtcactgaatggttcgactggagaggtcattttgggcaagctgcctctatccccaccagcacttagtggtgatttgggagaattcatgtcttgggtggatgaagttaagaaactcaaggtcaaggctaatgctgatactcctgcggatgcactgactgcaagaaataacggtgcggaagggattgggttgtgcagaacagaacacatgttcttctcttctgatgaaaggataaaggccatgagacagatgataatggcggaaacaattgaacacaggcagatagcactagatcgcctcttgccatatcagagacttgactttgaaggaattttccgtgcaatggatggacttcctgtgactattcgactcttggatcctccactccacgaattccttccagagggtaacgttgaggatatggttcgtttgttgtcttctggaaacgtatatactcaggaggaaattcttacaagaatagaaaaactttctgaagtgaatccaatgcttggcttccgtgggtgcaggcttgggatatcatacccagaattgacagcaatgcaagcccgtgctatctttgaagctgctatttctatgactgaacaaggtgttaaagttttcccagagataatggtgcctctcattggaacacctcaggaactcgcccaacaagtagatgtaattcgtgaagttgccgaaaaggtttttgcaaatgcagaaacaaccattagctacaaaattggatccatgattgaggttcccagggctgctcttatagctgatgagatagcagcactagccgaattcttctcgtttgggacgaacgacctgactcagatgacatttggttatagcagggacgatgttggcaagtttctgccaacctacttgtcaaagggtatcctccagaatgaccccttcgaggtgtttgaccagaagggagtgggggagcttgttaaggttgccgtagagcggggccggaaggcaaggcctgatttagaggtgggcatttgtggggaacatggtggtgagccttcttcagttgcatttttcgcgaaggttgggctgaactacgtttcttgctccccattcagggttccaattgcaaggctagcagcagcgcaggtgatgctgtga

SEQ ID NO: 106 - protein, 796 aa, Oryza sativa
MGAVLGDPRRPLLLSVRSGAAVSMPGMMDTVLNLGLNDHVVAGLAHRSGERFAYDSYRRFLDMFGNVVMDIPHSLFEEKIEAMKAALGLRNDTELTARDLKELVAQYKNVYVEAKGEEFPSDPKKQLHLSVLAVFNSWDSARAKKYRSINQITGLKGTAVNVQCMVFGNMGDTSGTGVLFTRNPSTGERKLYGEFLVNAQGEDVVAGIRTPQDLDTMKDCMPEPYAELVENCKILESHYKEMMDIEFTVQENRLWMLQCRTGKRTGKGAVKIAVDMVNEGLIDRRSAIKMVEPRHLDQLLHPQFESPSSYGDKVIATGLPASPGAAVGQIVFTADDAEAWHAQGKSVILVRTETSPEDVGGMNAAAGILTARGGMTSHAAVVARGWGKCCVAGCSGIRVNDAEKVVLVADKVLCEGEWLSLNGSTGEVILGKLPLSPPALSGDLGEFMSWVDEVKKLKVKANADTPADALTARNNGAEGIGLCRTEHMFFSSDERIKAMRQMIMAETIEHRQIALDRLLPYQRLDFEGIFRAMDGLPVTIRLLDPPLHEFLPEGNVEDMVRLLSSGNVYTQEEILTRIEKLSEVNPMLGFRGCRLGISYPELTAMQARAIFEAAISMTEQGVKVFPEIMVPLIGTPQELAQQVDVIREVAEKVFANAETTISYKIGSMIEVPRAALIADEIAALAEFFSFGTNDLTQMTFGYSRDDVGKFLPTYLSKGILQNDPFEVFDQKGVGELVKVAVERGRKARPDLEVGICGEHGGEPSSVAFFAKVGLNYVSCSPFRVPIARLAAAQVML

SEQ ID NO: 107 - DNA, 2436 bp, Oryza sativa
atggcacagcagcaagccggtgcaagaggcagcaagctggagatcgtcgccgcccggggaggaagtggcggcagcagcagcgccggcgatgcggaggcgccgccgttggacgtcctgaggcaggactccctctaccgcgacgcgacgcggccggcccacggccaccatggacaggagagctggatgaggacgctgcggctggggttccagtgcgtgggaatcctgcacgccgacctcggcacgtcgccgctctacgtgtaccagaacacattcaagtacggcatcaagcacgaggacgacatcatcggcgtcctctccctcatcatctacagcttcgtgctattcaccatggtcaagatcgtcttcatcgccctccacgccaacgacgatggcgacggtgggacatttgctctgtactcgttgatctcgcggtacgccaaggtgtgcctgatcccaaaccagcaagccgaggatgagctggtgacgaggtacaacgaccacgggaagccgccggcgacgctgcggagggcgcagtggatgaagagccagctcgagaagaagcccgccaagattgccgtcttcttcctcaccatcttcgccaccgcgctggccatcagcgactgtgtgctaaacccttcagtctctgtactttcggcggtcaacggcttgaaacttagagcacctcatctgacaacagacgaagtggtctggatcacggtgggaatactggtggtgtttttcgcagtgcaacggtttggcactgacaagattggctacacatttgccccggttgttgttgtgtggctgttactcatctcagggattggcatctatgacttggtcaagtacgatgtcggtgtcttgagggcgttcaaccccaaatatatcatcgattatttccgacgaaataagaaggacggatgggtccagctcggtgaagttcttcttacatttaccggcacagaagctctctttgctgatttaggatacttcagcatcaaatcaattcagttaagctctacctttgtcttgctcccatcagtgttatgcacctacattgggcaagcagcatacctaaggaaacacatggatcagcagcacatacaaaacgctttcttcaattccattccaagacctctgttctggccaatgttcgttctcgctatcatgacgtcagtcatcggttgccaagccatggtgtcttgtgcctttgcaaccatgtcacacttgcagacactgaattgtttcccacggattaagatactgcacacatcaaggcgttattcaggacagttgtacagtcctgaagtgaacttcttcctctgcctactttcctgtgtaatcaccttaagtttcaggacgacaggtttcattgtcaaagcacatgaaatttgtgtggtccttgtgatggttatcacaactatcctgatgactatagtcatgcttctcgtatggaaagtaaatatttggtggatcgttctattctttgtcgtcttcatgtcaacggagaccgtctacctatcagcagttctctacaagttcacaaaaggaccatacatgcccttggctatgtcagctgttctaatggtgatcatgttcgtgtggcactacgtgcatgtgaagcgatacaagtttgagcttgaacataccgtatcacctaataaggtcagagagctccttgaacggcgtgatctaaagagggttcctggtgtggggctcttctacactgaattggtgcaaggcatcccaccgatattccctcaccttatcgagaaaatcccgaccattcactcggtgatcgtgttcatctctatgaagcacttgcctatccctcatgtcgatgtctcggagcgcttcctcttccggcaagtggagcccaaggagtgcatggtgtttcgatgtgtcgcacgatatggatatcgggatactctagagatggctgatgactttgtcaccactcttgtcgagtacctccagtactatatccgggacctaaatctatacaacacggttgagccactcaagatgagctgcccaagcattagaattgatagtttttcctgggatagacgaccctcagggcatggcatttatgccgaggagatgcttacaccaatccaatcattttctgagctcacaatgcatcctgttggtatgagcagccgattagcgcaattccaaacaactaagatgagccttgaagagatgttgaagattgaggaagaccaaaagttgatccaacgagaagtggacaatggtgtggtttacatacttggggagagtgaagtggtagcgaaaccacattccaacttgcttaagaaagttgttgtaaactacatattcaactttctgaggaaaaactctcgaaaaggagagaagatgttgtctattccacgccgcaagttgctcaaggttggaatcacgtacgaaatataa

SEQ ID NO: 108 - protein, 811 aa, Oryza sativa
MAQQQAGARGSKLEIVAARGGSGGSSSAGDAEAPPLDVLRQDSLYRDATRPAHGHHGQESWMRTLRLGFQCVGILHADLGTSPLYVYQNTFKYGIKHEDDIIGVLSLIIYSFVLFTMVKIVFIALHANDDGDGGTFALYSLISRYAKVCLIPNQQAEDELVTRYNDHGKPPATLRRAQWMKSQLEKKPAKIAVFFLTIFATALAISDCVLNPSVSVLSAVNGLKLRAPHLTTDEVVWITVGILVVFFAVQRFGTDKIGYTFAPVVVVWLLLISGIGIYDLVKYDVGVLRAFNPKYIIDYFRRNKKDGWVQLGEVLLTFTGTEALFADLGYFSIKSIQLSSTFVLLPSVLCTYIGQAAYLRKHMDQQHIQNAFFNSIPRPLFWPMFVLAIMTSVIGCQAMVSCAFATMSHLQTLNCFPRIKILHTSRRYSGQLYSPEVNFFLCLLSCVITLSFRTTGFIVKAHEICVVLVMVITTILMTIVMLLVWKVNIWWIVLFFVVFMSTETVYLSAVLYKFTKGPYMPLAMSAVLMVIMFVWHYVHVKRYKFELEHTVSPNKVRELLERRDLKRVPGVGLFYTELVQGIPPIFPHLIEKIPTIHSVIVFISMKHLPIPHVDVSERFLFRQVEPKECMVFRCVARYGYRDTLEMADDFVTTLVEYLQYYIRDLNLYNTVEPLKMSCPSIRIDSFSWDRRPSGHGIYAEEMLTPIQSFSELTMHPVGMSSRLAQFQTTKMSLEEMLKIEEDQKLIQREVDNGVVYILGESEVVAKPHSNLLKKVVVNYIFNFLRKNSRKGEKMLSIPRRKLLKVGITYEI

SEQ ID NO: 109 - DNA, 1017 bp, Oryza sativa
agcttcgacgccgagcacaccgacacggcgctcgagcgctacgtccccttcgtcatggccacggcggagcagctccagcggcgggagcgcgtgctcaggatcttcatgaacgaggtgcgctcgtggcacggcttcaaccaccaccacccggcgacgttcgacacgatcgccatggaacccgacctcaagaagtccatcgtcgacgacctcgaccgcttcctgaagcggaaggagtactaccgccgcatcggcaaggcgtggaaacgcgggtacctcctccacggcccgcccggcaccggcaagtccagcctcgtcgccgccatggccaactacctccgcttcaacctctacgacctcgacctctccgaggtgcgcgtcaacgccgcgctgcagcgcctgctcatcagcatgcccaacaaatccatcctcgtcatcgaggacatcgactgctgcttcgacgccaacccaagagaagcccacaagatcaccacggcggcgctcgaccaggccgaggacttcgacttctcctcgtcggactccgacgacgccgtcggcgcgccgcccagagcgcgccgcgcgggagatctccagcagcagaagctgacgctgtccgggctgctcaacttcatcgacgggctgtggtccacgagcggcgaggagcgcgtcatcgtcttcaccacaaactacaaggagcgcctcgatccggcgctgctccggccggggcggatggacatgcacgtctacatgggctactgcggctgggaggcgttcaagacgctcgcgcacaactacttcctcgtcggcgaccacccgctgttcccggagatacggcagctgctcgccggcgtggaggtgacgccggccgaggtgtcggagatgctgctgcgcagcgaggacgccgacgccgcgctccggggcctcgtggagttcctccgtgagaggacgcggcggagggcaagacaagaggcagcgatcgacgacaaccaagtggtagcagaaaaaggcaatgcagcttaa

SEQ ID NO: 110 - protein, 338 aa, Oryza sativa
SFDAEHTDTALERYVPFVMATAEQLQRRERVLRIFMNEVRSWHGFNHHHPATFDTIAMEPDLKKSIVDDLDRFLKRKEYYRRIGKAWKRGYLLHGPPGTGKSSLVAAMANYLRFNLYDLDLSEVRVNAALQRLLISMPNKSILVIEDIDCCFDANPREAHKITTAALDQAEDFDFSSSDSDDAVGAPPRARRAGDLQQQKLTLSGLLNFIDGLWSTSGEERVIVFTTNYKERLDPALLRPGRMDMHVYMGYCGWEAFKTLAHNYFLVGDHPLFPEIRQLLAGVEVTPAEVSEMLLRSEDADAALRGLVEFLRERTRRRARQEAAIDDNQVVAEKGNAA

SEQ ID NO: 111 - DNA, 438 bp, Oryza sativa
atgaccgatgcgcctccgccgaggagccgcccgcacccacccagcagcagcgtcgccgtgcccgccgccgcggcggcagtgatcgcagccgccctcgcgtcctccttcctcgccctgctgcagccgccccggcgcgccccggtcgccgcgggatccagggtcggcatgtcgaaggcgagggtctacgccgacgtcaacgtgctgcgccccaaggagtactgggactacgaggcgctcaccgttcaatggggtgagcaggatgactatgaagttgtcaggaaagttggaagaggtaaatatagtgaagtctttgaaggcatcaatgttaacaacaatgagaaatgcatcatcaagatactcaagcctgtgaagaaaaagaagatcaaaagggagattaaaatacttcagaatctttgtggaggtccaaacattgtgtag

SEQ ID NO: 112 - protein, 145 aa, Oryza sativa
MTDAPPPRSRPHPPSSSVAVPAAAAAVIAAALASSFLALLQPPRRAPVAAGSRVGMSKARVYADVNVLRPKEYWDYEALTVQWGEQDDYEVVRKVGRGKYSEVFEGINVNNNEKCIIKILKPVKKKKIKREIKILQNLCGGPNIV

SEQ ID NO: 113 - DNA, 1065 bp, Oryza sativa
atgactccggcggctgatggcgacgacgatgagacgacatgcatccgtgccttggagctaatcttcacctttgtcgttcccatgacactcaaggcgacgatcaagcttggcctcctcgacgcactcaccggcggcggccacgcactcaccgccgacgagctggccgcggccgcgcaactgccggccgaggcggcgtcgtcggtggaccgcatgctgaggctcctcgcgtcgttggatgtcgtcaagtgcgccccgacagacactggaggcgaagcagctgtccggcggtacacgccagcgccggtgtgcaggtggtttgccggcgaaaggtctctggcaccgctggccatgttcctcctcgacgacgactacctgagcacctggaatcagttgccggcggcggtggccggcggcgacgggcaggtggcgttcgagaaggctcgcgggatgcccatgttcgagtacatggggacgaaccgccggctgaacacgctcttcaaccaggccatggtgcagcagtcgacggtggtgatcggcaagctgctcgagcgattccaggggttcgacggcgtcagcgtgctcgtcgacgtcggcgggggcaccggcgccaccctggagatgatcacttcgaggtacaagaacatcaccggcgttaacttcgacctgcctcatgtcattgctcaggctccatctcttccgggtgtcaaacatatagctggaaatatgtttgagagcgtacctaatggagatgcaattttcttgaagtcgatgctccacctacataacgatgaggactgcatcaagatcctcaagaagtgccaccaagcactcacacacaacgggaaggtgattgctgttgagatacttctcccagcgattccagagccggtcccaacagcacaaaacccattccggatggacatgatcatgctcaacaatcactggggaggaaaggagaggacggaaccagagtttgctaagctagccgtggaatgtggctacaccggtgtatttcaagcaacctatattttcgctaactattgggctcttgagttcagcaagtag

SEQ ID NO: 114 - protein, 354 aa, Oryza sativa
MTPAADGDDDETTCIRALELIFTFVVPMTLKATIKLGLLDALTGGGHALTADELAAAAQLPAEAASSVDRMLRLLASLDVVKCAPTDTGGEAAVRRYTPAPVCRWFAGERSLAPLAMFLLDDDYLSTWNQLPAAVAGGDGQVAFEKARGMPMFEYMGTNRRLNTLFNQAMVQQSTVVIGKLLERFQGFDGVSVLVDVGGGTGATLEMITSRYKNITGVNFDLPHVIAQAPSLPGVKHIAGNMFESVPNGDAIFLKSMLHLHNDEDCIKILKKCHQALTHNGKVIAVEILLPAIPEPVPTAQNPFRMDMIMLNNHWGGKERTEPEFAKLAVECGYTGVFQATYIFANYWALEFSK

SEQ ID NO: 115 - DNA, 1872 bp, Oryza sativa
atggcgaagaagaactacggtcaagtgtacaacatcctcgggtggggcgacccctacttcaccgtgaactcccatggccacctcgccgtcaagccccatggccgcgacaccatgtccggccaggacatcgacgtccactccgtcatccacagagctctcgccaccaccatcaccaccaacgacggcgacaagaagccccagttcccgatgatcctccgcttccccgacgtgctcaagaaccgcctcgactccctccacgccgccttccatggcgccgtcgacagcaccggctacgcgtccaggtaccagggcgtgttccccatcaaggtgaaccagaacaaggccgtcgtccaggacctcgtcaccttcggccatggctacagctacggcctcgaggctggctccaagccggagctgctcatcgccatgagctgcctcgccaaggccaagcccggagcttacctggtctgcaatggctacaaggacgccgactacgtcgcgctcgcgctctccgcgcgcgccatgggcctcaacgccatcatcgtgctggagatggaggaggagctcgacatcgtcgtcgagcagagcgccaggctcggcgtcgagccggtcatcggcgtccgcgccaagcttctcaccaagattccgggacacttcggctccacggccggcaagcacggcaagttcgggatgctcgccgacaagatctacgaggtggccggcaagctgaagaagatggggaagctgcactggctgaagctgctgcactaccatgtcggctccatgatcccgaccaccgacatcgtgtacaacgcggcggccgaggccgcaggaatctactgcgcgctggtgaaggagcacggcgcgacggggatgaccacgctggactgcggcggcgggctcggcgtcgactacgacgggacgcggtcgggcagctccgacatgtcggtggcgtacgggctcgagcagtacgcgtccagcatcgtgcaggcggtgcggctcacgtgcgacgacaatggcgtcccccacccggtgctctgcaccgagagcggccgcgccatggcgtcgcaccactccatgatcatcctcgaggcgctctcggcgatcccggagccgcaggacgaggaggacacccatcaccggctgctcagcaagatccaggacctctcctccaagcagccaagaactgctcataccgtcaatggcggcggcggcgtggacgccatgcactcgcacgccgtggagctgaagaagcacgggatcgagatgtacaagctggcgaagaagctgtccaagagggtgaccggcgacgccaacggcatctacaactaccacatgaacctctccgtcttctccctcgtccccgacttctggggcatcggccagctcttcccgatgatgccggtgagccggctgaacgagaagccgaccatcaacggcacgctggtcgacatcacctgcgacagcgacggcaaggtagagaagttcatccgcgacgccgtgacgctgccgctgcacccactcgacgacgcggcggcggagcacggcggctactacgtggcggcgctgctgtcgggggcgtaccaggaggccctggcgtgcaagcacaacctgttcagtggccccacgctcgtgcgcgtcgagagcgccggcggcggcggcgcgttcaagatcgtctccgttgagctcggcccgacggcggaggaggtcatcggcacgatgaggtacgacgtgaagaacgacattagcgatgtgatcgagaaggttgcgacggagaatggcgtgtggccgatggttgagccgctgatgaagaaagggctgaccaccatgccctacctcaacgattacaagccccccaaaaccaccttttaa

SEQ ID NO: 116 - protein, 623 aa, Oryza sativa
MAKKNYGQVYNILGWGDPYFTVNSHGHLAVKPHGRDTMSGQDIDVHSVIHRALATTITTNDGDKKPQFPMILRFPDVLKNRLDSLHAAFHGAVDSTGYASRYQGVFPIKVNQNKAVVQDLVTFGHGYSYGLEAGSKPELLIAMSCLAKAKPGAYLVCNGYKDADYVALALSARAMGLNAIIVLEMEEELDIVVEQSARLGVEPVIGVRAKLLTKIPGHFGSTAGKHGKFGMLADKIYEVAGKLKKMGKLHWLKLLHYHVGSMIPTTDIVYNAAAEAAGIYCALVKEHGATGMTTLDCGGGLGVDYDGTRSGSSDMSVAYGLEQYASSIVQAVRLTCDDNGVPHPVLCTESGRAMASHHSMIILEALSAIPEPQDEEDTHHRLLSKIQDLSSKQPRTAHTVNGGGGVDAMHSHAVELKKHGIEMYKLAKKLSKRVTGDANGIYNYHMNLSVFSLVPDFWGIGQLFPMMPVSRLNEKPTINGTLVDITCDSDGKVEKFIRDAVTLPLHPLDDAAAEHGGYYVAALLSGAYQEALACKHNLFSGPTLVRVESAGGGGAFKIVSVELGPTAEEVIGTMRYDVKNDISDVIEKVATENGVWPMVEPLMKKGLTTMPYLNDYKPPKTTF

SEQ ID NO: 117 - DNA, 1389 bp, Oryza sativa
atggcgagcatgaatgatcaacacggcggcgccaccgcccacgtcctgctcgtgccgttgccggcgcagggccacatgaacccgatgctccagttcggccgccgcctcgcctaccacggcctccgccccaccctcgtcgccacccgctacgtgctctccacgagccctcctcccggcgaccccttccgcgtcgccgccttctccgacggcttcgacgccggcggcatggcctcctgccccgaccccgtcgagtactgccgccgcctcgaggccgtcgggtcggagacgctggcgcgggtcatcgacgccgaggcgcgcgtggggagggccgcgaccgtgctcgtctacgacccccacatggcgtgggtgccgcgcgtggcgcgcgccgccggcgtccccacggccgcgttcctgtcgcagccgtgcgccgtggacgcgatctacggcgaggtgtgggccggccgcgttccgctgccgatggacgacgggggcgacctccggcggcgcggggtgctcagcgtcgacctcgcgacggcggacttgccgccattcgtggcggcgccggagctgtacccgaaatacctcgacgtctcgatccggcaattcgaggacctgctcgacgccgacgacgtgttcgtcaactcgttcaacgacctcgagccgatggaggccgagcacatggagtcgacatggcgagccaagaccgtcggcccgacgttgccgtccttcttcctcgacgacggccggctgccggcgaacaagaaccacggcatcgacatcttcaccggtgatgcgccgtgcatggaatggctggataagcaggcaccctgctcggttgttcttgcctcctatggcacggtctactctctcgacggcgccgagctcgaggagctcggcaatggcctctgcaattccggcaagccattcctctgggtggtgaggtcgagcgaggggcacaagttatctgaagagcttcgtggaaagtgcaaggagaaggggttaattgtgtcctggtgtccccagcttgaggtcctgaaacataaggcaacaggttgtttcttgacgcattgtggatggaactcgacgatggaagcaattgctacggcggtgccaatggttgcgatgcctcagtcagcggaccaaccgactatagcgaagtacgtggaaaccgcatgggagattggtgtgagggcacaactagatgagaaaggctctgtcacgaaggaggaggtggagatatccatcaagaaagtgatggatgggaagagggcagtggagtacaagaggaatgcagctaagtggatgcaaaaagccaaggaagcagcacaagtaggcgggagctcagacaagaacattgctgaatttgtagcaaaatatttatcaaattag

SEQ ID NO: 118 - protein, 462 aa, Oryza sativa
MASMNDQHGGATAHVLLVPLPAQGHMNPMLQFGRRLAYHGLRPTLVATRYVLSTSPPPGDPFRVAAFSDGFDAGGMASCPDPVEYCRRLEAVGSETLARVIDAEARVGRAATVLVYDPHMAWVPRVARAAGVPTAAFLSQPCAVDAIYGEVWAGRVPLPMDDGGDLRRRGVLSVDLATADLPPFVAAPELYPKYLDVSIRQFEDLLDADDVFVNSFNDLEPMEAEHMESTWRAKTVGPTLPSFFLDDGRLPANKNHGIDIFTGDAPCMEWLDKQAPCSVVLASYGTVYSLDGAELEELGNGLCNSGKPFLWVVRSSEGHKLSEELRGKCKEKGLIVSWCPQLEVLKHKATGCFLTHCGWNSTMEAIATAVPMVAMPQSADQPTIAKYVETAWEIGVRAQLDEKGSVTKEEVEISIKKVMDGKRAVEYKRNAAKWMQKAKEAAQVGGSSDKNIAEFVAKYLSN

SEQ ID NO: 119 - DNA, 1401 bp, Oryza sativa
atggggagcatgagcacaccggcggcgagcgccaacggcgggcaagtgctcctgttgccgttcccggcggcgcagggccacaccaacccgatgctccagttcgggcgccgcctcgcgtaccacggcctccgccccaccctcgtcaccacgcggtacgtgctctccaccacgccgccgccgggggaccccttccgcgtcgccgccatctccgacggcttcgacgacgccagcggcatggccgcgctcccggaccccggggagtacctccgcaccctggaggctcacggtgcacgcacgctggcggagctcctcctctccgaggcgcgcgcggggcggccggcgcgcgtgctggtgtacgacccgcacctgccgtgggcgcgccgcgtggcgcgcgccgccggcgtggccaccgctgcgttcctgtcgcagccgtgcgccgtcgacctcatctacggggaggtgtgcgcgcggcggctggcgctgccggtgacgccgacggacgcgagaggtctgtacgcgcggggtgtgcttggcgtcgagctggggcccgacgacgtgccgccgttcgttgcggcgccagagttgacaccagccttctgtgagcagtcgatcgagcagttcgccggactggaggacgacgacgacgtgctcgtcaactcattctctgacctcgagccaaaggaggcagcatacatggagtcgacatggcgcgcgaagacgatcggcccgtcattgccttcgttctacctcgacgacggccggctgcggtcgaacacagcatacgggttcaatctcttcaggagcaccgtgccatgcatggaatggctggacaagcaacctcctcgctctgtcgtccttgtgtcgtacgggacagtctccaccttcgacgtagccaagctggaggagctcggcaatggcctttgcaactccggcaagccattcctttgggttgtcaggtccaatgaggagcacaagttatctgtccaactccgaaaaaagtgtgagaagagaggactaattgttcccttttgcccccagctggaggtgcttgctcacaaggccacaggttgtttcttgtcgcactgtggatggaactcgacattggaggcaattgttaatggcgtaccgcttgtggcaatgccacattgggctgaccaaccaaccatttcaaagtatgtggagagcttgtggggcatgggcgtgcgagtgcagctggacaagagcggcatcttacaaagggaagaggtagagagatgcatccgggaggtgatggatggtgacaggaaggaggactacaggaggaatgctacaaggttgatgaagaaagctaaggagtcaatgcaggaaggagggagctctgacaagaatattgctgaatttgctgcgaagtattcaaattga

SEQ ID NO: 120 - protein, 466 aa, Oryza sativa
MGSMSTPAASANGGQVLLLPFPAAQGHTNPMLQFGRRLAYHGLRPTLVTTRYVLSTTPPPGDPFRVAAISDGFDDASGMAALPDPGEYLRTLEAHGARTLAELLLSEARAGRPARVLVYDPHLPWARRVARAAGVATAAFLSQPCAVDLIYGEVCARRLALPVTPTDARGLYARGVLGVELGPDDVPPFVAAPELTPAFCEQSIEQFAGLEDDDDVLVNSFSDLEPKEAAYMESTWRAKTIGPSLPSFYLDDGRLRSNTAYGFNLFRSTVPCMEWLDKQPPRSVVLVSYGTVSTFDVAKLEELGNGLCNSGKPFLWVVRSNEEHKLSVQLRKKCEKRGLIVPFCPQLEVLAHKATGCFLSHCGWNSTLEAIVNGVPLVAMPHWADQPTISKYVESLWGMGVRVQLDKSGILQREEVERCIREVMDGDRKEDYRRNATRLMKKAKESMQEGGSSDKNIAEFAAKYSN

SEQ ID NO: 121 - DNA, 933 bp, Oryza sativa
atggacgccgagatggccatgggcgagagcttcgcctactactgggagacgcagcgctaccttgagtccgaggagctcgacagcatgtacctgccgacgcaggatgactccaactacgagtcgagctcgccggacgggtcgcactcgtcgtcggcgccggcgccggcggccgtgggcggggacgcagccgccgcggtggcgggtagcggtggcgggatgacgacgatgatgatgggcggcggcggcggcggtggcgacgacgccggtggcgcgaacaagaacatcctcatggagcgcgaccgccgccgcaagctcaacgagaagctctacgcgctccgcagtgtcgtgcccaacatcaccaagatggacaaggcgtcgatcatcaaggacgcgatcgagtacatccagcgcctgcaggcggaggagcagcagatgctccgggaggtcgccgcgctcgagtccgccgccgcggcgagcgccgccccggccgcggcgaacccgttcgccggcctcggcgccgacgaggaacacgagtacggccaccaccacccctcgtcgtcgtcggagcggacgaagaaggtgaagcgggcgctgtccgtgtcgtccatcagcgacgccctgctcgccgcggcggcgccggcgccgccggtggagatccaggagctgcgcgtgtcggaggtgggcgacagggtgctggtggtgagcgtgacgtgcagcaagcgccgcgacgccatggcccgggtgtgccgcgccctcgaggagctccgcctccgcgtcatcaccgccaacatcacctccgtcgccggctgcctcatgcacaccctcttcgtcgaggtagatcacatggatagtgtccaaatgaagcagatggtggaggctgctctctcccagcttgtggcgaccggcagtccgttgagctccatgagctattag

SEQ ID NO: 122 - protein, 310 aa, Oryza sativa
MDAEMAMGESFAYYWETQRYLESEELDSMYLPTQDDSNYESSSPDGSHSSSAPAPAAVGGDAAAAVAGSGGGMTTMMMGGGGGGGDDAGGANKNILMERDRRRKLNEKLYALRSVVPNITKMDKASIIKDAIEYIQRLQAEEQQMLREVAALESAAAASAAPAAANPFAGLGADEEHEYGHHHPSSSSERTKKVKRALSVSSISDALLAAAAPAPPVEIQELRVSEVGDRVLVVSVTCSKRRDAMARVCRALEELRLRVITANITSVAGCLMHTLFVEVDHMDSVQMKQMVEAALSQLVATGSPLSSMSY

SEQ ID NO: 123 - DNA, 1494 bp, Oryza sativa
atggggtcgttgccggcggcggcggaggcgcggccgcacgccgtgatggtgccgtacccggcgcagggccacgtcacgccgatgctgacgctggcgaagctgctatactcccgcggcttccacgtcaccttcgtcaacaacgagttcaaccaccgccgcctcctccgcgcccgcggcgcccgcgcgctcgacggcgcccccggcttccgcttcgccgccatggacgacggcctcccgccatccgacgccgacgccacccaggacgtcccggccctctgccactccgtccgcaccacctggcttcccaggttcatgtcgctcctcgccaagctcgacgacgaggccgccgccgccgccgccgcggacggcgcggcgcggcgcgtcacctgcgtcgtcgccgacagcaacatggcgttcggcatccacgccgcgcgggagctcggcctccgctgcgccacgctctggacggccagcgcgtgcgggttcatgggctactaccactacaaacacctgctcgaccgcggcctcttccccctcaaaagcgaggctgacctcagcaatgggcacttggacacgacggtggattggatcccgggcatgaccggcgacctgcggctgcgcgacctcccgagcttcgtgcggagcacggaccgtgacgacatcatgttcaacttcttcgtccacgtgacggcgagcatgtcgctggcggaggcggtgatcatcaacaccttcgacgagctcgacgcgccgtcgtcgccgctgatgggcgccatggccgcgctgctcccgccgatctacaccgtcggcccgctccacctggcggcgcggagcaacgtgccggcggacagccccgtcgccggtgtcgggtccaacctgtggaaggagcagggcgaggcgctccggtggctggacggccggccgccgcgctccgtggtgtacgtcaacttcgggagcatcacggtgatgtcggccgagcacctggcggagttcgcgtgggggctcgccggcagcggctacgcgttcctgtggaacttgcgccccgacctcgtcaagggcgacggcggcgccgcccccgcgctgccgccggagttcgcggcggcgacgagggagaggagcatgctgacgacgtggtgcccgcaggcggaggtgctggagcacgaggcggtgggggtgttcctcacccactccggctggaactcgacgctggagagcatcgccggcggcgtgccgatggtgtgctggccgttcttcgccgagcagcagaccaactgcaggtacaagcgcacggagtgggggatcggggcggagatccccgacgacgtgcggcgcggcgaggtggaggcgctgatacgggaggccatggacggggagaaggggagggagatgcggcggcgcgtggcggagctcagggagagcgccgtcgcggcggcgaagcccggtggccggtccgtgcacaacatcgataggctcatcgacgaggtgctcatggcttga

SEQ ID NO: 124 - protein, 497 aa, Oryza sativa
MGSLPAAAEARPHAVMVPYPAQGHVTPMLTLAKLLYSRGFHVTFVNNEFNHRRLLRARGARALDGAPGFRFAAMDDGLPPSDADATQDVPALCHSVRTTWLPRFMSLLAKLDDEAAAAAAADGAARRVTCVVADSNMAFGIHAARELGLRCATLWTASACGFMGYYHYKHLLDRGLFPLKSEADLSNGHLDTTVDWIPGMTGDLRLRDLPSFVRSTDRDDIMFNFFVHVTASMSLAEAVIINTFDELDAPSSPLMGAMAALLPPIYTVGPLHLAARSNVPADSPVAGVGSNLWKEQGEALRWLDGRPPRSVVYVNFGSITVMSAEHLAEFAWGLAGSGYAFLWNLRPDLVKGDGGAAPALPPEFAAATRERSMLTTWCPQAEVLEHEAVGVFLTHSGWNSTLESIAGGVPMVCWPFFAEQQTNCRYKRTEWGIGAEIPDDVRRGEVEALIREAMDGEKGREMRRRVAELRESAVAAAKPGGRSVHNIDRLIDEVLMA

SEQ ID NO: 125 - DNA, 345 bp, Oryza sativa
atgcttaaatcatgtgaaggaagtgtttattggatggcacccgaggttgtcaatcccaagaggacatatggaacggcagctgatatatggagtctcggttgcacagtcctggagatgttgacacgtcaactgccttacccaaatttagaatgggcacaagctttatttaagatcggaaggggtgaaccaccagcaatcccaaaatacctttcaaaggaggctcgtgatttcataagccagtgtttgagaccatatccggatgatagaccttctgcatccaaattattggaccatcctttcgtgaataggtcagtaaggtctataatgtctgtaatgacatcttga

SEQ ID NO: 126 - protein, 114 aa, Oryza sativa
MLKSCEGSVYWMAPEVVNPKRTYGTAADIWSLGCTVLEMLTRQLPYPNLEWAQALFKIGRGEPPAIPKYLSKEARDFISQCLRPYPDDRPSASKLLDHPFVNRSVRSIMSVMTS

SEQ ID NO: 127 - DNA, 603 bp, Oryza sativa
atggctggagcttccaaccttcctcccggtttccacttcttcccgtcagatgaagagctcatcattcatttcctccgccgcaaggcctccctcctcccttgccaacctgacatcgtccctactctgatcttgaatctctatgatccatgggaattgaatggtaaagcactccaatccggtaaccaatggtacttcttcagtcatgcgacgcagactaggacctcgccaaatgggcactggaaacccattgctgatgagacagttattagtggtggttgtaatgttggcctgaagaagaccctcattttcttcattggggagccctttgaggcgatcaaaactaactgggtcatgcatgagtaccacctaatggatgggagtaccaattgcagcagtagcagtacttcaagcagttcaagcaagcggtcccacaagaaaaaaggtcactcagacacagaatccaagaactgggtgatatgccgagtgttcgaatcgagttatgattcacaagtgagcttccatgaggagggcacggaactgtcatgcttagatgaggtgtttctatccctagacgactatgatgaagtcagttttgccaaataa

SEQ ID NO: 128 - protein, 200 aa, Oryza sativa
MAGASNLPPGFHFFPSDEELIIHFLRRKASLLPCQPDIVPTLILNLYDPWELNGKALQSGNQWYFFSHATQTRTSPNGHWKPIADETVISGGCNVGLKKTLIFFIGEPFEAIKTNWVMHEYHLMDGSTNCSSSSTSSSSSKRSHKKKGHSDTESKNWVICRVFESSYDSQVSFHEEGTELSCLDEVFLSLDDYDEVSFAK

SEQ ID NO: 129 - DNA, 1032 bp, Oryza sativa
atggagcagcatcagggccaggcaggcatggacttgccccctggcttccgcttccacccgaccgacgaggagctgatcacgcactacctcgccaagaaggtcgccgacgcccgcttcgccgccctcgccgtcgccgaggccgacctcaacaagtgcgagccctgggacctgccatctctggcgaagatgggggagaaggagtggtacttcttctgcctcaaggacaggaagtacccgacggggctgaggacgaacagggcgacggagtccgggtactggaaggccacggggaaggacaaggacatcttcagacggaaggccctcgtcggcatgaagaagacgctcgttttctacacggggcgcgctcccaagggggagaagtctggctgggtcatgcacgagtaccgcctccacggcaagctccacgccgccgccctcggcttcctccacggcaagcccgcgtcgtccaagaacgagtgggtgttgtgcagggtgttcaagaagagcctcgtggaggtgggcgcggcgggagggaagaaggcggccgtggtgacgatggagatggcgaggggagggtcgacgtcgtcgtccgtggcggacgagatcgccatgtcgtccgtcgtcctccctccgctgatggacatgtccggagccggcgccggcgccgtcgacccggcgacgacggcgcacgtgacctgcttctccaacgcgctggagggccagttctttaacccgacggcagtacacgggcacggcggcggcgactcctcgccgttcatggcgagcttcacgcagtacgggcagctgcaccacggcgtgagcctggtgcaactcctggagagctgcaacggctacggcggcctcgtcgacatggcagcgtccggcagccagctgcagccggcggcgtgcggcggcgagcgggagaggcttagcgcgtcgcaggacaccggcctcacctccgacgtgaacccggagatctcgtcatcctccggccaaaaattcgaccacgaggccgcgctatggggctactaa

SEQ ID NO: 130 - protein, 343 aa, Oryza sativa
MEQHQGQAGMDLPPGFRFHPTDEELITHYLAKKVADARFAALAVAEADLNKCEPWDLPSLAKMGEKEWYFFCLKDRKYPTGLRTNRATESGYWKATGKDKDIFRRKALVGMKKTLVFYTGRAPKGEKSGWVMHEYRLHGKLHAAALGFLHGKPASSKNEWVLCRVFKKSLVEVGAAGGKKAAVVTMEMARGGSTSSSVADEIAMSSVVLPPLMDMSGAGAGAVDPATTAHVTCFSNALEGQFFNPTAVHGHGGGDSSPFMASFTQYGQLHHGVSLVQLLESCNGYGGLVDMAASGSQLQPAACGGERERLSASQDTGLTSDVNPEISSSSGQKFDHEAALWGY

SEQ ID NO: 131 - DNA, 357 bp, Oryza sativa
atgcagcaaaagatcgtgatcaaggtgagcatgccgtgcgagaagagccggtccaaggccatggcgctggtggcgagggcgtccggcgtgaactcgatggaggtcaccggcgacggcaaggaccggctgcaggtggtcggcgacggcgtcgacccggtctgcctcgtcgcctgcctccgcaggaagatcggctacgccgagatcgttcaggtggaggaggtgaaggacaagaagccggaggagaagcagccggagccacccaagcccgtgccatgctactacccagctcctccctgctactacccgccggcgacggtggtctgcagcgacgagccgagcccctgctccatcatgtaa

SEQ ID NO: 132 - protein, 118 aa, Oryza sativa
MQQKIVIKVSMPCEKSRSKAMALVARASGVNSMEVTGDGKDRLQVVGDGVDPVCLVACLRRKIGYAEIVQVEEVKDKKPEEKQPEPPKPVPCYYPAPPCYYPPATVVCSDEPSPCSIM

SEQ ID NO: 133 - DNA, 369 bp, Oryza sativa
atgaagcaaaagatcgtgatcaaggtgagcatgccgtgcgagaagagccggtccaaggcgatgaagctggtggtgatggcctccggcgtgagctcggtggaggtcaccggcgacggcaaggaccggctgcaggtggtcggcgacggcgtcgacgcggcctgcctcgtcacctgcctccgcaagaagatcggccacgcggagctcgtgcaggtggaggaggtgaaggagaagaagccggaggagaagaagccggaggagaagaagccggagccgtgctactgccctcatccctgctactaccaccaccactacggtgggataccggtggccgtcggcgaccagccgagcgacccctgctccatcatgtaa

SEQ ID NO: 134 - protein, 122 aa, Oryza sativa
MKQKIVIKVSMPCEKSRSKAMKLVVMASGVSSVEVTGDGKDRLQVVGDGVDAACLVTCLRKKIGHAELVQVEEVKEKKPEEKKPEEKKPEPCYCPHPCYYHHHYGGIPVAVGDQPSDPCSIM

SEQ ID NO: 135 - DNA, 720 bp, Oryza sativa
atggcggcggcggaagtgcagtcggctgccgggtgggggaggcagctgcagcaggacggcggcgggtggaggaaagggccgtggacgagccaggaggacgcgctgctcgtcgagcatgtcaggcagcacggcgaaggccggtggaattctgtctccaagcttacaggtctgaagagaagcggcaagagctgcaggctacgatgggttaactacctgaggcctgatctgaagagaggcaagatcactccccaggaggagagcatcatcgtccagctccatgccttgtggggcaacaggtggtcgacgatcgcgcgtagcctcccgggcaggacggacaacgagatcaagaactactggaggacgcacttcaagaagggcaagccgtccaagaacatcgagcgcgccagggccaggttcctgaagcagcgccgcgagatgcagcagagccagcagctgcagcagccgacgctaatgccgacgccgacgccgcagagcaaggacatcatcgttgccgagaccggtgacgcgcgcaccgacgacgacgcgggcggcgccgcagcggctgtggcgccgtcgtcgtcgtcgtcgtctttgtcgatggggggcggggaggcggaggacttgatcatgcaccaggacgcgatggacgacctcatgatgtgccccgccatgtctaccacctcatcctccacggcgccgccgtcgccgggcatcagctga

SEQ ID NO: 136 - protein, 239 aa, Oryza sativa
MAAAEVQSAAGWGRQLQQDGGGWRKGPWTSQEDALLVEHVRQHGEGRWNSVSKLTGLKRSGKSCRLRWVNYLRPDLKRGKITPQEESIIVQLHALWGNRWSTIARSLPGRTDNEIKNYWRTHFKKGKPSKNIERARARFLKQRREMQQSQQLQQPTLMPTPTPQSKDIIVAETGDARTDDDAGGAAAAVAPSSSSSSLSMGGGEAEDLIMHQDAMDDLMMCPAMSTTSSSTAPPSPGIS

SEQ ID NO: 137 - DNA, 1395 bp, Oryza sativa
atggcagcgaagggaaacccagcggatgcggtcgccatcgtggccgtgccgttcccggcgcagggccacctcaaccagctcctgcacctgtcgctgcagctcgcgtcgtcgtcgcacgggctcacggtgcactacgctgcgccggcgccgcagctccgccaggcgcgggcgcgcgtgcacggctgggacgacaaggccctcctctccgtccagttccacgacctcggcgtctccacgtacgtctctccgccacccgatcccaccgccgacgcgcccttcccctcccacctcatgcccctctgggaggcgtacaccgcggacgcgcgcgccccgctctcggcgctccttggcgagctgtccgcgtcctaccgccgggtcgtcgtcatctgcgacatcatgaactccttcgccgtcaaggaggcggcgcggctgcccaacggcgaggcattcgtgtgtaactgcgtagccgtgtcgtccgccaccgggagcatcgaccccgggcaccggctcctgcgcgagaacggcctccgcttcattcccatggatacctacttgaccaaggagttcatggactacgagcaacagcgagcaagagcggcgcagtcgatctcgtcctgcgccggcatcctcgcgaacgcgtgccgcgcgctcgagggtgaattcatcgacgttttcgccgagagattggatgccagcagcaagaagctcttcgcgatcgggccgttaaacccactgctcgacacgggcgcattgaagcagggccggcggcgacacgagtgccttgactggctcgacaggcagccaccggaatccgtgctctacgtgtcgttcggcacgacgtcctctcttcgggtggagcaggtcgcggagctcgccgcggcactgcgcggcagcaagcagcggttcatctgggtgctgcgcgacgccgaccgcggcaacatattcgcgggctccggcgagagcgagagccggtacgccaagcttctgtccgagttctgcaaggaaaccgaaggcacgggcctggtgatcaccgggtgggcgccgcagctggagatcctggcgcacggcgccacggcggcgttcatgagccactgcggctggaactccaccatggagagcctgagccacgggaagccgattctggcgtggcccatgcactcggaccagccgtgggacgcggagctggtgtgcaactacctcaaggccggattcttggtaaggccatgggagaagcacggtgaggtggtgccggcgacaaccatacaagcggtgatcgaaaagatgatggcatctgaagaagggttggcggtgcggcagcgcgcgaaggccctcggccatgccgtccgttcatcgcgcaatgatcttgaggacttcgttgatcatatcacaagatga

SEQ ID NO: 138 - protein, 464 aa, Oryza sativa
MAAKGNPADAVAIVAVPFPAQGHLNQLLHLSLQLASSSHGLTVHYAAPAPQLRQARARVHGWDDKALLSVQFHDLGVSTYVSPPPDPTADAPFPSHLMPLWEAYTADARAPLSALLGELSASYRRVVVICDIMNSFAVKEAARLPNGEAFVCNCVAVSSATGSIDPGHRLLRENGLRFIPMDTYLTKEFMDYEQQRARAAQSISSCAGILANACRALEGEFIDVFAERLDASSKKLFAIGPLNPLLDTGALKQGRRRHECLDWLDRQPPESVLYVSFGTTSSLRVEQVAELAAALRGSKQRFIWVLRDADRGNIFAGSGESESRYAKLLSEFCKETEGTGLVITGWAPQLEILAHGATAAFMSHCGWNSTMESLSHGKPILAWPMHSDQPWDAELVCNYLKAGFLVRPWEKHGEVVPATTIQAVIEKMMASEEGLAVRQRAKALGHAVRSSRNDLEDFVDHITR

SEQ ID NO: 139 - DNA, 1059 bp, Oryza sativa
atggctccagccattgccaagcctctcctgagcgatctggtggcacaatccgggcaagtcccctcgagccacattcgtccggttggcgaccgcccggacctcgacaacgtcgaccacgagtccggcgccggcattccggtcatcgacctgaaacagctcgacggcccggatcgccgcaaggttgtcgaggccatcggttcggcgtgcgaaaccgacggttttttcatggtgaagaatcacgggatcccggaggaggtggtggaagggatgctgcgcgtggcgagggagttcttccacatgccggagtcggagcggctcaagtgctattccgacgaccccaagaaggcgatccggctgtcgacgagcttcaacgtgcgcaccgagaaggtgagcaactggcgcgacttcctgcgcttgcattgctaccctctcgagagcttcatcgaccagtggccctccaacccaccctccttcaggcaagtggtcggcacctactcgagggaggcgagggcgctggcgctgcggttgctggaggcgatatctgagagcctcgggctggagaggggccacatggtgtcggccatggggcggcaggcgcagcacatggcggtgaactactatccgccatgcccacagccggagctcacctacggcctgccggggcacaaggaccccaatgccatcacgctgctgctccaggacggcgtctccggcctgcaggtccagcgcaacggccgctgggtggccgtcaaccccgtgcccgacgccctggtcatcaacatcggagatcaaatccaggcgctgagcaacgaccggtataagagcgtgctccaccgggtgatcgtgaacagcgagagcgagaggatctccgtgccgacgttctactgcccgtccccggacgcggtgatcgcgccggccggcgcgctggtggacggcgccctgcacccgctggcgtaccggcccttcaagtaccaggcctactacgacgaattctggaacatgggcctccagtccgccagctgcttagaccggttccggcctaacgatcaggccgtctga

SEQ ID NO: 140 - protein, 352 aa, Oryza sativa
MAPAIAKPLLSDLVAQSGQVPSSHIRPVGDRPDLDNVDHESGAGIPVIDLKQLDGPDRRKVVEAIGSACETDGFFMVKNHGIPEEVVEGMLRVAREFFHMPESERLKCYSDDPKKAIRLSTSFNVRTEKVSNWRDFLRLHCYPLESFIDQWPSNPPSFRQVVGTYSREARALALRLLEAISESLGLERGHMVSAMGRQAQHMAVNYYPPCPQPELTYGLPGHKDPNAITLLLQDGVSGLQVQRNGRWVAVNPVPDALVINIGDQIQALSNDRYKSVLHRVIVNSESERISVPTFYCPSPDAVIAPAGALVDGALHPLAYRPFKYQAYYDEFWNMGLQSASCLDRFRPNDQAV

SEQ ID NO: 141 - DNA, 1392 bp, Oryza sativa
atggcgcgttttcaggaaaccaaggcgaggaatgatcaaggacctgttgctgatcatgttgggcaccaaaacctcatggaaaacctcacagatcctctggattccagtggcatggacatgatggacgaagcgcgaattcctaaggcgcggaagccatacacgataacgaagcaaagggagaaatggaccgaggacgaacataagctgttcttggaagccctgcagctccatggccgagcctggcgacgcatccaagagcacataggcaccaagactgccgtgcagatcaggagccacgcacagaagttcttctccaaggtcatcaaagaatcatctggggacaattgcaacagcttgggtgctgcatcatcaattcagattcccccgccgcggccgaagcgtaagcctgttcatccgtacccacgcaatctagggagcacagccagcaagaacgtccctgcactgaaacagctagagaagcctcagctgcaggtgcagtctctctacgaccaggacaatgggtcgccgacgtcagtgttaacagtaccacagatacgggctgatacactgggaagtgagagtggtgggtcgccaacctcgacgattgatattgaagagagatgtcctacaccaagcatagcaactgctgagttagctatggagttgcctcctacaaatgacgaggaggtcaagggcaatggcgatcatgaagaagttacatgtgacagatcaggagttccagtccttaggctatttggcaagagggttatggtgaatgatttacatcagatgtcagcccctgatgccgggaacctgcaaactgtggcagacatggaagtggacgcttcagctgagacaccaactagtggaactgggaaattctcttcccatggtgcagcagaagcaaatacatggaacccatggctgactaacacacagcagtttctgtattatcttcctaacggacaaattttctccgtgcattctgctctcccatgcttcacctaccataatgagggtgttacttgcacccagttttcaaacccacaggtggtagcctcagatcaacagcatcaacaccaaacttctgaagctgtagattacaagggtatacagagggaaggatcttggacggagtcaaatacatcctcaagcagtgtgcctgaaacagcaactcataattcagagactacagaatcatatagaaacggaaacagaaacgaagatgaaatggtaccttctccagattcaagaaaatgtgtgagcccaggttccaactgcaggcgaggctttgtgccgtacaagagatgtgttgctgatagtgaggcgctgctgaagtcacaggcgcctcaggaggaggcagacggagagatgacgaggctgtgcttataa

SEQ ID NO: 142 - protein, 463 aa, Oryza sativa
MARFQETKARNDQGPVADHVGHQNLMENLTDPLDSSGMDMMDEARIPKARKPYTITKQREKWTEDEHKLFLEALQLHGRAWRRIQEHIGTKTAVQIRSHAQKFFSKVIKESSGDNCNSLGAASSIQIPPPRPKRKPVHPYPRNLGSTASKNVPALKQLEKPQLQVQSLYDQDNGSPTSVLTVPQIRADTLGSESGGSPTSTIDIEERCPTPSIATAELAMELPPTNDEEVKGNGDHEEVTCDRSGVPVLRLFGKRVMVNDLHQMSAPDAGNLQTVADMEVDASAETPTSGTGKFSSHGAAEANTWNPWLTNTQQFLYYLPNGQIFSVHSALPCFTYHNEGVTCTQFSNPQVVASDQQHQHQTSEAVDYKGIQREGSWTESNTSSSSVPETATHNSETTESYRNGNRNEDEMVPSPDSRKCVSPGSNCRRGFVPYKRCVADSEALLKSQAPQEEADGEMTRLCL

SEQ ID NO: 143 - DNA, 1140 bp, Oryza sativa
atggcgccgacgacgacggccacggcggcggcggagcaggcgccgccgccgcagcatacgaggaaggcggtggggctcgccgcgcacgacgactccggccacctcacacccatccgcatctcgcgcaggaaaactggagatgacgacgtcgctataaaggtgctgtactgtgggatttgtcactctgacctgcacaccatcaagaatgagtggagaaacgctgtctacccagttgttgcagggcacgagatcaccggggtggtgaccgaggtggggaagaacgtggcgaggttcaaggccggcgacgaggtcggcgtcgggtgcatggtgaacacctgcggcggctgcgagagctgccgggacggctgcgagaactactgctccggcggggtcgtcttcacctacaactccgtcgaccgggacggcacgcgcacctacggcggctactccgacgcggtggtcgtcagccagcgcttcgtcgtgcgcttcccctcctccgccggcggcggcgccggcgccgcgctgccgctggacagcggcgcgccgctgctgtgcgccggggtgacggtgtacgcgccgatgaggcagcatgggctgtgcgaggccgggaagcacgtcggcgtggtggggctcggcgggctcggccacgtcgccgtcaagttcgccagggcgttcgggatgagggtgacggtgatcagcacgtcgccggtgaagaggcaggaggccctggagaggctcggcgccgacggcttcatcgtcagcaccaacgccagtgagatgaaggctgcgatgggcaccatgcatggcatcatcaacacggcctctgcaagcacatccatgcactcttacctggcactcttgaagcccaagggcaagatgatcttggttggcctgcctgagaagcctctccagatcccaaccttcgctttggttggagggggcaagatactagctgggagctgcatggggagcatcagtgaaacgcaggagatgatcgacttcgccgccgagcacggggtggccgccgacatcgagctgatcggcgccgacgaggtgaacacggccatggagcgcctcgccaagggcgacgtcaggtaccgcttcgtcgtcgacatcggcaacaccctcaggtcggattga

SEQ ID NO: 144 - protein, 379 aa, Oryza sativa
MAPTTTATAAAEQAPPPQHTRKAVGLAAHDDSGHLTPIRISRRKTGDDDVAIKVLYCGICHSDLHTIKNEWRNAVYPVVAGHEITGVVTEVGKNVARFKAGDEVGVGCMVNTCGGCESCRDGCENYCSGGVVFTYNSVDRDGTRTYGGYSDAVVVSQRFVVRFPSSAGGGAGAALPLDSGAPLLCAGVTVYAPMRQHGLCEAGKHVGVVGLGGLGHVAVKFARAFGMRVTVISTSPVKRQEALERLGADGFIVSTNASEMKAAMGTMHGIINTASASTSMHSYLALLKPKGKMILVGLPEKPLQIPTFALVGGGKILAGSCMGSISETQEMIDFAAEHGVAADIELIGADEVNTAMERLAKGDVRYRFVVDIGNTLRSD

SEQ ID NO: 145 - DNA, 2163 bp, Oryza sativa
acgacgatggccaacatcaacaccagaggtgaccgagcttatgcagtgctgctagactcaggaaacttggttcttcggctgccggacaatacaaccgcatggcaaagctttgatcacccaactgatacccttctccccaacaagaagtttttcctgagatacaaggcacaagtcgccatgcgacttgtcgcttggaagggaccgaatgacccatccaccggggacttctcctaccacagcgaccccagatcaaaccttcaggccttcatctggcacgggaccaagccatattaccgtttcattgcactttcacttaatagagtgttagtgtccggtgaagcatacgggagcaacattgccactttgatgtacaaatcacttgtgaacactagggatgagttgtacattatgtacacaacctctgatggctccccatacacacgaatcaagcttgactacatgggcaacatgaggttcctgagttggaacgggagctcatcgtcctggacagtcatctctcaacagccagcggccgctggtgactgcaatctctacgcctcatgtggcccattcggctactgcgacttcacattggccatccccagatgccagtgccttgatggattcgagccaagtgatttcaactcttcgagaggatgtcgaagaaagcaacagttgggatgcggaggtaggaaccatttcgtgaccatgtctggaatgaagctccctgacaagttcttgcaagtccagaacagaagcttcgaggagtgcatggccaagtgcagccacaactgctcatgcatggcctacgattatgcttatggcaacttgaccaaagccgacaccatgtccgatcagtcaaggtgcttgctctggactggggatcttgctgacatggcgagggcaagccttggtgacaacctatacctccggttagccgactctcctggacacacttctgaagataagaaaaagaacagatatctagtggtggttttagtcacaattattccatgcctgctgatgctcacatgcatataccttgtcaggaaatggcaatcaaaagcatcggtgttattaggcaaacggagaaacaacaaaaatcagaacagaatgctgctaggaaaccttagatctcaagaactaattgagcagaatttagaattttcacatgttaattttgaatacgttgtcgcggcaacaaacaatttcagcgattccaacattcttggaaaaggaggtttcggtaaggtttataaggggaaattggaaggcgggagagaagttgctgtcaaaaggctcaacacaggttgcacacaagggatagagcattttacaaatgaagttgttcttattgacaaattgcagcacaaaaatctagttaggcttcttggctgctgtattcatggagatgaaaagcttcttatttttgaatatttacgcaacaaaagcttggattactttctttttgatgattcaaaaaagcctatacttgattggcaaacaaggttcaacataatcaaaggagtagccagaggtcttgtttatctccaccaagattcaagaatgagagtaattcacagagatctcaaagccagcaatattttattggatgaggagatgagccccaaaatatcagattttggtatggcaaggatctttggtggcaaccagcatcaagcaaacactaaacatgtagtcgggacatatggttacatgtctcctgaatatgcaatggaaggcatcttctctgtcaagtctgacacatatagctttggtgttttagtcttggaacttataagtggttgtaagatcagctcaactcatcttataatggattttccaaaccttatagcctgtgcatggagcttgtggaaagatggaaaggcagagaaatttgtggactcaattattctggagtgctattcgcttaatgagtttttgctctgtatccatgtaggactgttatgcgttcaggaagacccaaatgctagaccactcatgtcatcagttgtggccatgttcgagaatgaagccacaacacttcctacttctaagcaacctgcatattttgtgccaaggaattgcatggcagaaggggcaagagaggatgccaacaagtctgtgaacagtacaagtcttaccacactacaaggacgttag

SEQ ID NO: 146 - protein, 720 aa, Oryza sativa
TTMANINTRGDRAYAVLLDSGNLVLRLPDNTTAWQSFDHPTDTLLPNKKFFLRYKAQVAMRLVAWKGPNDPSTGDFSYHSDPRSNLQAFIWHGTKPYYRFIALSLNRVLVSGEAYGSNIATLMYKSLVNTRDELYIMYTTSDGSPYTRIKLDYMGNMRFLSWNGSSSSWTVISQQPAAAGDCNLYASCGPFGYCDFTLAIPRCQCLDGFEPSDFNSSRGCRRKQQLGCGGRNHFVTMSGMKLPDKFLQVQNRSFEECMAKCSHNCSCMAYDYAYGNLTKADTMSDQSRCLLWTGDLADMARASLGDNLYLRLADSPGHTSEDKKKNRYLVVVLVTIIPCLLMLTCIYLVRKWQSKASVLLGKRRNNKNQNRMLLGNLRSQELIEQNLEFSHVNFEYVVAATNNFSDSNILGKGGFGKVYKGKLEGGREVAVKRLNTGCTQGIEHFTNEVVLIDKLQHKNLVRLLGCCIHGDEKLLIFEYLRNKSLDYFLFDDSKKPILDWQTRFNIIKGVARGLVYLHQDSRMRVIHRDLKASNILLDEEMSPKISDFGMARIFGGNQHQANTKHVVGTYGYMSPEYAMEGIFSVKSDTYSFGVLVLELISGCKISSTHLIMDFPNLIACAWSLWKDGKAEKFVDSIILECYSLNEFLLCIHVGLLCVQEDPNARPLMSSVVAMFENEATTLPTSKQPAYFVPRNCMAEGAREDANKSVNSTSLTTLQGR

SEQ ID NO: 147 - DNA, 1263 bp, Oryza sativa
  misc_feature (381)..(381): n is a, c, g, or t
cacgtacatctcggtgatatacgcctaccgcccaccggctccggccaacgccgccctcgaggcggggctcgccaaggcgctgatcgagtaccgcgagtgggcagggcgcctcggcgtggacggcgacggcaaccgcgccatcctgctcaacgacgggggcgcgcggttcgtcgaggcgacggccgacgtgacgctggacagcgtgatgccgctgaagccgacggcggaggtgctgagcctgcacccgagcggggcagactgaccgcgggtgggagcagtgatggcgtcagtcccagggtcaacagcaggtttcagcgtggcaggctcacctcagtgcgtggggcttgcaccaacagcaagcacaatcatggacaagacagnccgcgcacaaccaaacaacttcttgcctgcgcgtgggagccaggccacccgcggcgccgcattccacctgtgccccgtgcacgaccgcgtctccttcttcgcgccgcgcgacactcccaagtcgagttcgagcaccgtggcgtggagttcaagccgtacgacgacgacgaggatgtccatgcgtccgccgccgccggcgacgacgacgaggtggtgataaacaaggtgcacttgagccgggaattcatctcgaagctcaagtcgcaggcgtcggctggcgcgcaccggccgtacagcacgctgcagtgcgtggtggcgcacctgtggcgatgcatgacgaaggcacgcgggctcgacgggcgcgagtccaccagcgtgtgcatcgccgtcgacgggcgcgcgcggatgagcccgccggtgccggacggctacacgggcaatgtcgtgctctgggcgcggccaaccgcgacggccggtgagctggtgaccaggccgctgaagcacgccgtggagctcatcaaccgggaggtgatccggatcaacgacggctacttcaagtcgttcatcgacttcgccaactccggtgcggtggaggaggagcggctggtggcgtcggccgacgcggcggagatggtgctgagcccgaacatcgaggtggacagctggctgcggatcccgttctacgacctcgacttcggcggcgggcggccattcttcttcatgcccagctacctgccggtggaaggtttgctcatcctgctgccgtctttcttcggcgacgggagcgttgacgcgtacgtgccactcttcagccgcgacatggacgtcttcaagaactgctgctactcattcgacaaagaccaaactactagccttgcatga

SEQ ID NO: 148 - protein, 420 aa, Oryza sativa
  misc_feature (127)..(127): Xaa can be any naturally occurring amino acid
HVHLGDIRLPPTGSGQRRPRGGARQGADRVPRVGRAPRRGRRRQPRHPAQRRGRAVRRGDGRRDAGQRDAAEADGGGAEPAPERGRLTAGGSSDGVSPRVNSRFQRGRLTSVRGACTNSKHNHGQDXPRTTKQLLACAWEPGHPRRRIPPVPRARPRLLLRAARHSQVEFEHRGVEFKPYDDDEDVHASAAAGDDDEVVINKVHLSREFISKLKSQASAGAHRPYSTLQCVVAHLWRCMTKARGLDGRESTSVCIAVDGRARMSPPVPDGYTGNVVLWARPTATAGELVTRPLKHAVELINREVIRINDGYFKSFIDFANSGAVEEERLVASADAAEMVLSPNIEVDSWLRIPFYDLDFGGGRPFFFMPSYLPVEGLLILLPSFFGDGSVDAYVPLFSRDMDVFKNCCYSFDKDQTTSLA

SEQ ID NO: 149 - DNA, 1461 bp, Oryza sativa
atggctgcgcttctcatgaacaccggcgctgtctcgatgcccttccccaccacgcgcaccgccgcgcgacggcgaaccagcagaagcagatgccaggcttcatctagcggcggtagcagcaacgaaggaggcggcgagagctaccgcgggaggagcgggcgcggtgggtcgacgacgtgggtgacggagtacgacctgtacgggctgctgggcgtggagcggtcgtcgccgcagtcggagatcaaggccgcgtaccggtcgctgcagaagcggtgccaccccgacgtcgccggcgccaagggccacgacatggccatcgtcctcaacgaggtctactccctcctctccgaccccgccgcccgcctcgcctacgaccaggagcaagcgaagcagtcggagttcgtcgggtacacggggaagccgctctactcggcgtggttcggcggcgaggccgagcagcgcgcggtgttcgtggacgaggtgaggtgcgtcggctgcctcaagtgcgcgctctacgccaacaagacgttcgccgtcgagtccgtctacggccgcgcccgcgtcgtcgcgcagtgggccgacgccgaggacaagatcctcgacgccatccagacatgccccgtcgactgcatctcgatggtcgagaggtcagatctcgcggctctcgagttcttgatgtccaaacagccgcgcggcagagtccgggtctcggaaggcaacaccgtgggcgctcgcgcacccgacatcttcaacgaggtaagcaagtttcagaagaggttccaggagatgaagcagaagtctgccacgagagaatccgaggagtcggaggcagcaaggcaatcgaggagctcggcagttcagacgatcaggtcgatctcgaactggtggtactggcagccgttcagagctccggcgaccaccgtactcgcttctctccacctgccggcgccgccgccttctccttccatgcccgccgacccggtgacggacaggctccaagaagcggcagctcgacgcaaagcgggaggcgcgacggcggcgaggacggtggcttcgtacgcccgccgcgacgactactggactccgcagctgaacctgccgtccctagcatcgccgccggagcgacctcaccggaggcagagcgcttctcctccccgcagccagacgcggcgagcaacccccaccggcgatggcggggtgacattgggcagcatcgacctgacggcgccgctgctgatggcgatcatctcggccgggttcgtgggttacaacagggaggaggtggccggagtcggcggcggcggcatccaggagcacgtcggtggcgccgccgctctgggtctcgtgaacagcttcgagctcaagatcgtcctagcctccgtgacatggttcatcatcggcgcggcgattgccggattcattcagtttctcgcgaggagcgaagtgaacttcaggaaatga

SEQ ID NO: 150 - protein, 486 aa, Oryza sativa
MAALLMNTGAVSMPFPTTRTAARRRTSRSRCQASSSGGSSNEGGGESYRGRSGRGGSTTWVTEYDLYGLLGVERSSPQSEIKAAYRSLQKRCHPDVAGAKGHDMAIVLNEVYSLLSDPAARLAYDQEQAKQSEFVGYTGKPLYSAWFGGEAEQRAVFVDEVRCVGCLKCALYANKTFAVESVYGRARVVAQWADAEDKILDAIQTCPVDCISMVERSDLAALEFLMSKQPRGRVRVSEGNTVGARAPDIFNEVSKFQKRFQEMKQKSATRESEESEAARQSRSSAVQTIRSISNWWYWQPFRAPATTVLASLHLPAPPPSPSMPADPVTDRLQEAAARRKAGGATAARTVASYARRDDYWTPQLNLPSLASPPERPHRRQSASPPRSQTRRATPTGDGGVTLGSIDLTAPLLMAIISAGFVGYNREEVAGVGGGGIQEHVGGAAALGLVNSFELKIVLASVTWFIIGAAIAGFIQFLARSEVNFRK

SEQ ID NO: 151 - DNA, 882 bp, Oryza sativa
atggcgcttcgacgcctcgcggcacttctctccttggcagtactactgtccgccggcctcgccgccgtgtcggcgacgtcccagaacaccggcgacaccgtgatcatctggggccggaacaaggacgagggctccctcagggaggcctgcgacgccggccgctataccaccgtcatcatctccttcctcagcgccttcggctacatcccgggcacctacaagctcgacatctccggccaccaggtctccgccgtcggccccgacatcaagtactgccagtccaagggtaaactcatcctcctcgccatcggcggccagggcggcgagtactccctcccgtcctcccaggcggccgtcgatctgcacgaccacctctggtactcctacctcggcggccgccgcaatggcgtctaccgcccgttcggcgacgccaacgtgaacggcatcgacttcttcatcgaccagggcgcgagggagcactacaacgagctggccaagatgctctacgaccacaacaaggactaccgcgccacggtcggcgtgatggtgacggcgacgacgcggtgcggctacccggaccaccggctggacgaggcgctggcgacggggctcttccaccgcatccacgtcaagatgttcagcgacggccggtgcccggcatggtccaggaggcagtcgttcgagaagtgggcaaagacgtacccgcagagccgtgtcctgatcggcgtcgtggcctcgccggacgtggacaaggacgcctacatgccgccggaggccctcaacaacctgctgcagttcatcaacaagcagcccaacttcggaggcgtcatggtttgggacaggttctacgacaagaagaccggcttcacggctcacctgtga

SEQ ID NO: 152 - protein, 293 aa, Oryza sativa
MALRRLAALLSLAVLLSAGLAAVSATSQNTGDTVIIWGRNKDEGSLREACDAGRYTTVIISFLSAFGYIPGTYKLDISGHQVSAVGPDIKYCQSKGKLILLAIGGQGGEYSLPSSQAAVDLHDHLWYSYLGGRRNGVYRPFGDANVNGIDFFIDQGAREHYNELAKMLYDHNKDYRATVGVMVTATTRCGYPDHRLDEALATGLFHRIHVKMFSDGRCPAWSRRQSFEKWAKTYPQSRVLIGVVASPDVDKDAYMPPEALNNLLQFINKQPNFGGVMVWDRFYDKKTGFTAHL

SEQ ID NO: 153 - DNA, 798 bp, Oryza sativa
acgatcaagcggacggtacatcgtcgcgtcgcgccgcgccgacgaggaggacgggctgcggcgcgcggttccggcgggcgcgctcgtgccacgggtcacgtaccgtgtcgtcgggtgggtcagcgtgcagggccagggcgacgggaggcaccatgcggtgcgcgtcggcctccgcgtggacggcgacggcggcgacgacgagcgcggctcttcgtcaacgactacaacgtcctgcgtgggaacgaccccaacgcgacgccggagaagtacgtcgagctggtggacgcgctgcggcgcggcggcgcggcggtgggcgggatcggggtgcaggggcacatggacagcccggtggccgggcaggtcatccgcgccgcgctggacaagctcgccgcggcgggcggcgcgcccatctggatcaccgagctggacgtgagcgagcccgacgtggggctccgcgccgacgacctggaggtggtgctgcgcgaggcgtacgcgcacccggccgtggagggcgtcgtgctctgggggttcatggaggggcagatgtggcgccgggacgcctacctcgtcgacgccgacggcaccgtcaacgaggccgggcagaggttcctccagctccagagggagtggaggtcggacgcgcgcggcattgtcgacggcgatggccgtttcaagttcaggggcttccacggcacgtacgtcgcgcaggtgacgacggcgacggggaagatgctcaagacgttcaccgtggagaaaggggataattctctcgagttggatttggatatcgaaatttga

SEQ ID NO: 154 - protein, 265 aa, Oryza sativa
TIKRTVHRRVAPRRRGGRAAARGSGGRARATGHVPCRRVGQRAGPGRREAPCGARRPPRGRRRRRRRARLFVNDYNVLRGNDPNATPEKYVELVDALRRGGAAVGGIGVQGHMDSPVAGQVIRAALDKLAAAGGAPIWITELDVSEPDVGLRADDLEVVLREAYAHPAVEGVVLWGFMEGQMWRRDAYLVDADGTVNEAGQRFLQLQREWRSDARGIVDGDGRFKFRGFHGTYVAQVTTATGKMLKTFTVEKGDNSLELDLDIEI

SEQ ID NO: 155 - DNA, 762 bp, Oryza sativa
gattacatggaaaatggtacccttcaagagcacttgtatggctcccaaaagccacctcttccatggaagcaacggcttgagatctgcatcggtgcagcgttggggctgcattacctacacactggtgcgaagcagaccatcatccaccgcgatgtgaagagtaccaacattctgttggatggcaaatgggtggcaaaggtttcagattttgggctgtccaaggttagcacagacaaggacaaaacctatgtgagcactgttgtgaaaggcagctttggatatcttgacccggagtactttcgaaggcagaaactcaccaagaaatcagatgtcttctcctttggggttcttttgttcgaggttctatgcgcacgtccggtaataaaccctgaacttccagaggagcaagtgagcttgcgtgactgggcactgtcttgccgtaagaaaggcatactcagtgagattattgacccccatctccaaggggaaatcaccccacagtgcttcaggaaattcacagagactgcagagcagtgtgttgctgattacagcatgaacaggccatccatgggtgatgtcctgtggaacctcgaggttgcactacagctgcaggagagtgcagaggaaaactgcgaagagacagcattgaacgtgttatcatcgcctttaacgaccaggttgcaaccatcatcccgctcaactatgagcatctctggacaaaaggctgtcttctcagagatgatgcatccagatggccgataa

SEQ ID NO: 156 - protein, 253 aa, Oryza sativa
DYMENGTLQEHLYGSQKPPLPWKQRLEICIGAALGLHYLHTGAKQTIIHRDVKSTNILLDGKWVAKVSDFGLSKVSTDKDKTYVSTVVKGSFGYLDPEYFRRQKLTKKSDVFSFGVLLFEVLCARPVINPELPEEQVSLRDWALSCRKKGILSEIIDPHLQGEITPQCFRKFTETAEQCVADYSMNRPSMGDVLWNLEVALQLQESAEENCEETALNVLSSPLTTRLQPSSRSTMSISGQKAVFSEMMHPDGR

SEQ ID NO: 157 - DNA, 1839 bp, Oryza sativa
atggggaggccgcggaagccggcgaagcccgcggccgcggcgtcctcctccgcctccgccgccgccgccttctcgatcggcaactgcaaggtggagatccacgggagcagcctgaggtgccagtccacggagcaggaggaggaggagctcaccatttctgggcccaggggcgcgaagatcgtcgtgtctgtcgacggggccaagagttcttcagttggtgacggttttgatttcatccttctcagtccgagtgatgtcaatgagcgaaacaaggcattgcttcaggaggtactattgctttataagcaagaactcccaactatggattatgctgctaacactggaaggaagtcagggtttctcgaaaaatgcgtgacaaatgggaagtacaagactctagttctgagctctactgcaggttatgaagaggtaacagctgccttatcatatcagctagtgccggctgacacacagtatgctgaaatacctctggcagtcgtgagacctccttatcaacgtgtgggtataggtcagctcttgtacaaggagcttagccagaggcttcgaaatgttggcgtcacaaccatattctgctgggcagataatgtctcagaaggattttggcttaaacagggttttgaatctgttggagaggtagatactaaaggcaagatttgcagaattccagtaagggccgatatcaagagggcattatgctttccaggtggttcaatgcttatggtttcacatctgaaggatttgccagctcctcaaaagagtttactttcatctcagcaaacatatcagtttcacacgtttgcaccagatagcatctctccaagtgataccggtacttcaactccctcctgtgaaaaattgcttccgcagacagttgcatgccacaaggtcagcaagactgcagcagtggaaaaaaatgaagatttccatggtaccggaggatgttcattttctgaccaacaagaaaataaacgtacacatgaaacctcatcatcttcactaaagtcaaaaagagtaagatgttcccaacattctgaccatcaccaagacatgaatcaaaatgagatctgtggcaaacccctttctataagcaacacccccatacatgaaaattcagtgcatctgatgcccaacgaactttctaatccaagcatggtaggtcatgttaaaagcaaaatatcaggagatgcaaaggccaatatcagttccaatggaagtccttctgttatgctcatgaatattgccgatgaaacaaagaagacacaacttatagaggtagttgagatgcttggcggagtagtcacttgtgaaggaaattcatgtactcatgtcattactggaaaagttcgaatgactatgaatttctgtattgctttgtgctctggagcctggatagtttctccaaagtggctgaaggaaagcttcaaaaaagggaaatttgtaggagaagcagaatatgtttttcaagatgatgaatttaaggtgaaatacaagtctgaactgagagatgcagttgtgagagctaaagagaggccttgctcattattttctggctacactttctgtctgacgaagaacatccagccctccgtcaatgttctctctcgcatcattaaatcttctggtggcaagctcatcaataagctggatgacataactcagcccttgaagacaatcttcttagcgtgtgaagaagatatggaacttgcattggatgctgcaaaaagaggcatcaaaacattcagcggtgagtggttcttgagctgtgtcatgacacaagagcttgaccttgaggcccctcagttcactgaatctctctga

SEQ ID NO: 158 - protein, 612 aa, Oryza sativa
MGRPRKPAKPAAAASSSASAAAAFSIGNCKVEIHGSSLRCQSTEQEEEELTISGPRGAKIVVSVDGAKSSSVGDGFDFILLSPSDVNERNKALLQEVLLLYKQELPTMDYAANTGRKSGFLEKCVTNGKYKTLVLSSTAGYEEVTAALSYQLVPADTQYAEIPLAVVRPPYQRVGIGQLLYKELSQRLRNVGVTTIFCWADNVSEGFWLKQGFESVGEVDTKGKICRIPVRADIKRALCFPGGSMLMVSHLKDLPAPQKSLLSSQQTYQFHTFAPDSISPSDTGTSTPSCEKLLPQTVACHKVSKTAAVEKNEDFHGTGGCSFSDQQENKRTHETSSSSLKSKRVRCSQHSDHHQDMNQNEICGKPLSISNTPIHENSVHLMPNELSNPSMVGHVKSKISGDAKANISSNGSPSVMLMNIADETKKTQLIEVVEMLGGVVTCEGNSCTHVITGKVRMTMNFCIALCSGAWIVSPKWLKESFKKGKFVGEAEYVFQDDEFKVKYKSELRDAVVRAKERPCSLFSGYTFCLTKNIQPSVNVLSRIIKSSGGKLINKLDDITQPLKTIFLACEEDMELALDAAKRGIKTFSGEWFLSCVMTQELDLEAPQFTESL

SEQ ID NO: 159 - DNA, 528 bp, Oryza sativa
atggctcttgaggggaaaccaggtttcattaccatgtacgccatcacatgctgcaaatgcgagaaatggcgtacgattccaacaaaagaagagttcgaggtaatccgtgagaactaccccgcgaagccatggttctgcagcaaaaagcgcgactgctcatgtgagcaccctgaagatatccagtatgacaccagccgtatttgggccattgataggcccaacatccctaagcctccgccgaagacagagaggctactgatcatgaggaatgatctatctaaaatggatgcctattatgtcttgccaaatgggaagcgtgcaaagggcaaacctgatatagataggtttctgaaggaaaacccagagtatgctgctactttaccactttcgagcttcaacttctcaacacctaagatagttaaggagactgtttccgatagtgcaaagtgggtgatggcgaagtctgagagggaagagcagtgtatgcaactagacgcaaaagaagttccaagttccagcagcaagtag

SEQ ID NO: 160 - protein, 175 aa, Oryza sativa
MALEGKPGFITMYAITCCKCEKWRTIPTKEEFEVIRENYPAKPWFCSKKRDCSCEHPEDIQYDTSRIWAIDRPNIPKPPPKTERLLIMRNDLSKMDAYYVLPNGKRAKGKPDIDRFLKENPEYAATLPLSSFNFSTPKIVKETVSDSAKWVMAKSEREEQCMQLDAKEVPSSSSK

SEQ ID NO: 161 - DNA, 1818 bp, Oryza sativa
atggagcttgccctggttggcaacccttcgaatggcgtggcgaagccgtcgtgcaactccgtcggctcgctgcccgtcgtcagctccaacgccgtcatcaacccgccggtgaccagcgcggcgggcgccacgctcggcaggcacctcgcgaggcgcctcgtgcagatcggcgccaccgacgtgttcgccgtccccggggacttcaacctcaccctgctcgactacctcatcgccgagcccgggctcaagctcatcggctgctgcaatgagctcaacgccgggtacgcggccgacggctacgcccgcgcccgcggcgtcggcgcctgcgccgtcacgttcaccgtcggtggcctcagcgtgctcaacgctatcgccggcgcctacagcgagaacctccccgtgatctgcatcgtcggcgggcccaactccaacgactacggcaccaaccgcatcctgcaccacaccatcggcctcccggacttctcacaggagctccgctgcttccagaccatcacctgctaccaggccgtcattaacaacctcgacgacgcgcacgagcagatcgacaccgccatcgcgacggcgctaagggagagcaagcccgtctacatcagcgtgggctgcaacctggcaggcctctcccacccaacgttcagtcgcgagccagtgccactattcatctcgccaaggctgagcaacaaggcgaacttggagtacgccgtcgaagccgcggcggacttcctgaacaaggcggtgaagccggtgatggtcggtgggccaaagatccgggtggccaaggcgaagaaggcgttcgccggcatcgcggagtcgagcgggtacccgttcgcggtgatgccgtccgcaaagggcctcgtgccggagcaccacccgcggttcatcggcacgtactggggcgccgtgagcaccaccttctgcgccgagatcgtcgagtccgccgacgcctacctcttcgccggcccaatcttcaacgactacagctccgtcggctactccctgctgctgaagcgggagaaggccgtcatcgtgcagcctgaccgcgtggtggtcggcaacggcccggcgttcggctgcatcctcatgacggagttcctcgacgcgctcgccaagcgcctcgaccgcaacacgacggcatacgacaactaccgccgcatcttcatccccgaccgcgagccgcccaatggccagcccgacgagccactcagggtcaacatcctcttcaagcacatcaaggagatgctgtctggcgacaccgccgtcatcgccgagaccggcgactcgtggttcaactgccagaagctcaggctccccgagggctgcgggtacgagttccagatgcagtacggctcaatcggttggtccgtcggcgccacgctcggatacgcccaggcggccaaggacaagcgcgtcatctcctgcatcggcgacggaagcttccagatgacggcgcaggacgtgtcgacgatgctgcggtgcgggcagaagagcatcatcttcctcatcaacaacggcgggtacaccatcgaggtggagatccacgacgggccgtacaacgtcatcaagaactgggactacaccggcctcatcgacgccatccacaactctgacggcaactgctggacaaagaaggtccggactgaggaggagctgatagaggcgatcgcgacggcgacgggcgccaagaaagactgcctctgcttcatcgagatcatcgtgcacaaagatgacacgagcaaagagcttctcgagtggggatccagggtctcggctgccaacagcaggccgcctaatccccagtga

SEQ ID NO: 162 - protein, 605 aa, Oryza sativa
MELALVGNPSNGVAKPSCNSVGSLPVVSSNAVINPPVTSAAGATLGRHLARRLVQIGATDVFAVPGDFNLTLLDYLIAEPGLKLIGCCNELNAGYAADGYARARGVGACAVTFTVGGLSVLNAIAGAYSENLPVICIVGGPNSNDYGTNRILHHTIGLPDFSQELRCFQTITCYQAVINNLDDAHEQIDTAIATALRESKPVYISVGCNLAGLSHPTFSREPVPLFISPRLSNKANLEYAVEAAADFLNKAVKPVMVGGPKIRVAKAKKAFAGIAESSGYPFAVMPSAKGLVPEHHPRFIGTYWGAVSTTFCAEIVESADAYLFAGPIFNDYSSVGYSLLLKREKAVIVQPDRVVVGNGPAFGCILMTEFLDALAKRLDRNTTAYDNYRRIFIPDREPPNGQPDEPLRVNILFKHIKEMLSGDTAVIAETGDSWFNCQKLRLPEGCGYEFQMQYGSIGWSVGATLGYAQAAKDKRVISCIGDGSFQMTAQDVSTMLRCGQKSIIFLINNGGYTIEVEIHDGPYNVIKNWDYTGLIDAIHNSDGNCWTKKVRTEEELIEAIATATGAKKDCLCFIEIIVHKDDTSKELLEWGSRVSAANSRPPNPQ

SEQ ID NO: 163 - DNA, 1314 bp, Oryza sativa
atgatggggaggtcggtgctggagatggtggtggcggcggcgcagggcggcggcggcgcggcgggggagtcggtgttgggcatgttcaggtacgccgtgctgcccatcgccaaggtgttcgtcgtctgcttcatggggttcctcatggcgtccaagcgcgtcggcgtgctcaagcccagcggccgcaagcttctcaatgcgcttgtgttctctctgctccttccttgcctaatatttgcgcagctcgggagatcaatcacaattgacaagatcatggagtggtggttcattccagcaaacattgctctgggtgcagtctctgcatctttggttggacttatagtggcattgattgtacggccgccttatccatacttcaagttcaccatcactcacattggaatagggaacattggaaatataccacttgtccttatctcggcattatgtcgcgaccaattaaatccgtttggtgactcgaacaaatgtactcaagatggaaatgcatacttatcatttggtcaatgggttggtgccattattgtttacacatatgtgttcaagatgcttgctccaccccccgggcagacctttgacagctgcgatgaggagagagataaacttccaattaaggctcctaataccatgtcaagtgtagcgaaatatccatcaagtgctcatggcaatacacatgaggaagagcccctgctatctatagaggaggaggaggaggaggaggggcaggacgttcattctttaggttcaaaaataatgattcctatcaagggcatggttagattcctacaaaagaagcagctcctccaaccaccaatcattgcatctgttcttgcaattactctcggtgttgtgccattcttgaagaatttgatcctcacagatgacgcgcctctattctttttaacagatagctgtctcattcttggggaagctatgattccgtgcattttgcttgccgttggtggcaatcttgttgacggccctggtgaaggaagtaggagacttggggttcggaccaccgtcgcgattatatttgcacgcttgatattggttccaattgctggtattggcatcgtctcatttgctgacaagcttggatttattccaaaaggagacaagatgttcaagttcgtcctgttactgcagcactctatgcccacatcggtactatcaggtgctgttgcaaacctaagaggttgtggcaaggaatcagctgcaatcttgttctgggtgcacatttttgctgtcttctccatggcaggatggattatcttatatcttaccatgctgttctag

SEQ ID NO: 164 - protein, 437 aa, Oryza sativa
MMGRSVLEMVVAAAQGGGGAAGESVLGMFRYAVLPIAKVFVVCFMGFLMASKRVGVLKPSGRKLLNALVFSLLLPCLIFAQLGRSITIDKIMEWWFIPANIALGAVSASLVGLIVALIVRPPYPYFKFTITHIGIGNIGNIPLVLISALCRDQLNPFGDSNKCTQDGNAYLSFGQWVGAIIVYTYVFKMLAPPPGQTFDSCDEERDKLPIKAPNTMSSVAKYPSSAHGNTHEEEPLLSIEEEEEEEGQDVHSLGSKIMIPIKGMVRFLQKKQLLQPPIIASVLAITLGVVPFLKNLILTDDAPLFFLTDSCLILGEAMIPCILLAVGGNLVDGPGEGSRRLGVRTTVAIIFARLILVPIAGIGIVSFADKLGFIPKGDKMFKFVLLLQHSMPTSVLSGAVANLRGCGKESAAILFWVHIFAVFSMAGWIILYLTMLF

SEQ ID NO: 165 - DNA, 603 bp, Oryza sativa
atggcttcccaccaggaccaggctagctaccgcgccggcgagaccaaggcccacaccgaggagaaggcggggcaggtgatgggggcgagcaaggacaaggcgagcgaggcgaaggacagggcgtcggaggcggcggggcacgccgccggcaaggggcaggataccaaggaggcgacgaaggagaaggcgcaggcggcgaaggagagggcgtcggagacggcgcaggcggcgaaggacaagacctccagcacgtcgcaggcggcgagggacaaagccgccgagagcaaggaccagaccggcggcttcctcggcgagaagaccgagcaggccaagcagaaggccgccgagaccgctggcgccgccaagcagaagaccgccgagacggcgcagtacaccaaggactctgccatcgccggcaaggacaagaccggcagcgtcctccaacaggcgagtgagcaggtgaagagcacggtggtcggcgccaaggacgcggtgatgagcacgctggggatgaccgaagacgaggccggcaccgacgacggcgccaacaaggacacctctgccaccgccgccgccacggagacgacggcgagggatcactag

SEQ ID NO: 166 - protein, 200 aa, Oryza sativa
MASHQDQASYRAGETKAHTEEKAGQVMGASKDKASEAKDRASEAAGHAAGKGQDTKEATKEKAQAAKERASETAQAAKDKTSSTSQAARDKAAESKDQTGGFLGEKTEQAKQKAAETAGAAKQKTAETAQYTKDSAIAGKDKTGSVLQQASEQVKSTVVGAKDAVMSTLGMTEDEAGTDDGANKDTSATAAATETTARDH

SEQ ID NO: 167 - DNA, 1830 bp, Oryza sativa
atgatgatacaacagcacagacttcatacacaaagtgatttggccagagatatactcttgaattttgatactctcctcccaaaatttataaaagtatatccaagggattacaagcgggttttggataaactaaaagaagagaaggctgctaaagaagcagagcaaaaggcaagagaagtggtggataagaagccagttgaagtaattcaagctccaaatggcatttcagtaaagacagagaaagtaatgaacgaagagccatcaagccgaccatcacgagtttcaaatgctgtaaagtaccgaggtttcataaaatatgagcgagagggtacttcttacagagatccaaatgagcgtgtaaaagattggaatgaagttgcaattgaattggttcctgggccactgctaaagacgcaatctgctcggtgcatggattgtggcactcctttctgtcatcaggagggttctggtgctggttgtcctcttggaaataagattcctgaattcaatgaattggttcatcagaatagatggcatgaagccttggatcggctacttgagacaaacaatttccctgagtttactggacgagtttgtcctgctccttgtgagggttcgtgcgtacttggcattatagacaatccagtatccataaaaagcatagagtgcgccatcatagacaaaggatttgaagagggatggatggtaccacggcctccacttcggagaacaggaaagagagttgctattgttggcagtggcccagctggtctagctgctgcagaccaactgaacaaaatgggccatttcgtgactgtctttgaacgtgctgaccgtattggaggactgatgatgtatggggttccaaatatgaaggctgacaaagagggcattgttcagcgacgtgtcgagttgatggctaaggagggggttcaattcattgtgaatgcccatgttggaagtgaccctttatactccgttgaaaagctccgctctgagaatgatgccattattttggcctgtggagctacaaagccaaaagatctccctattcctggacgggagttggcaggcatccatttcgctatggaatttcttcatgccaataccaaaagtttacttgacagcaacttggaggatggtaactacatatcagcccaagggagaaaggtggttgtcattggtggtggagacacaggcacagattgcattgggacatccattaggcatggttgcaccaaccttgtaaatcttgaacttttgccagagccaccaagaaagagggcacctgacaacccctggccccagtggcccaggatcttccgtgttgattatgggcaccaggaagcaactagcaagtttggaaaagatccaagaagttacaaagtcctgacgaagcgatttatcggagatgagaatggaaatgtgaaggcccttgaggtaatacgtgttgaatggggaaaggtgaacggaaggttccaattcaaggaagttgaaggatcagaagaaattattgaggccgatcttgtcctcttagctatgggattcctgggtcccgaagcgactgttgctaacaagctgggtctagaacaagacatgaggtcaaacttcaaagctcaatttggaaactttgcgaccaatgtggaaggtgtatttgctgctggagactgcagacgtgggcaatcactggttgtttgggccatcacagaggggcgccaagctgcagcagccgtagacaattacctgtcgaaggatgatgaaggtgaaaccaatggcacagaggacattgctgtctcaagtgaaggtctggtccaacccgtagttgcatag

SEQ ID NO: 168 - protein, 609 aa, Oryza sativa
MMIQQHRLHTQSDLARDILLNFDTLLPKFIKVYPRDYKRVLDKLKEEKAAKEAEQKAREVVDKKPVEVIQAPNGISVKTEKVMNEEPSSRPSRVSNAVKYRGFIKYEREGTSYRDPNERVKDWNEVAIELVPGPLLKTQSARCMDCGTPFCHQEGSGAGCPLGNKIPEFNELVHQNRWHEALDRLLETNNFPEFTGRVCPAPCEGSCVLGIIDNPVSIKSIECAIIDKGFEEGWMVPRPPLRRTGKRVAIVGSGPAGLAAADQLNKMGHFVTVFERADRIGGLMMYGVPNMKADKEGIVQRRVELMAKEGVQFIVNAHVGSDPLYSVEKLRSENDAIILACGATKPKDLPIPGRELAGIHFAMEFLHANTKSLLDSNLEDGNYISAQGRKVVVIGGGDTGTDCIGTSIRHGCTNLVNLELLPEPPRKRAPDNPWPQWPRIFRVDYGHQEATSKFGKDPRSYKVLTKRFIGDENGNVKALEVIRVEWGKVNGRFQFKEVEGSEEIIEADLVLLAMGFLGPEATVANKLGLEQDMRSNFKAQFGNFATNVEGVFAAGDCRRGQSLVVWAITEGRQAAAAVDNYLSKDDEGETNGTEDIAVSSEGLVQPVVA

SEQ ID NO: 169 - DNA, 1083 bp, Oryza sativa
atgaagaaggcgtcgtcgctgtctgagctggggttcgacgccgatggcccgtcattcttccggcacctgacgctgaccgatggcgacgacggcacgctgccccggcggcggctgatcaagatctcggtgatcggcgcgggcaacgtgggcatggccatcgcgcagacgatcctgacgcaggacctcgccgacgagatcgtgctgatcgacgcggtggcggacaaggtgcggggcgagatgctggacctgcagcacgcggcggcgttcctcccccgcgtgaacatcgtgtccggcacggaggtgtcgctgacgaggagctcggacctggtgatcgtgacggcgggggctcggcagatcccgggggagacgcggctgaacctgctgcagcggaacgtgtcgctgttccggaagatcgtgccggcggcggcggaggcgtcgccggagtcggtgctggtgatcgtgtcgaacccggtggacgtgctgacgtacgtggcgtggaagctgtcggggttcccggcgagcagggtgatcgggtcggggacgaacctggactcgtctcggttcaggttcctcctcgccgagcacctggaggtgagcgcgcaggacgtgcaggcgtacatggtgggggagcacggggacagctcggtggcgctgtggtcgagcatcagcgtgggggggatgccggtgctggcgcacctgcagaagaaccaccggtcggcggcgacggcgaagaagttcgacgaggcggcgctggaggggatccggcgggcggtggtggggagcgcgtacgaggtgatcaagctcaaggggtacacgtcgtgggccatcggctactccgtcgccagcatcgcctggtcgctgctccgtgaccagcgccgcatccacccggtctccgtcctcgccaagggccttgtccgtggcgtccccgccgaccgcgagctcttcctcagcctgcccgctcgcctcggccgcgccggcgtgcttggcgtcgccgccgagctggtgctcaccgacgaggaggagaggaggcttcgcatctccgccgaaaccctctggggatactgccacgccctcggcctctaa

SEQ ID NO: 170 - protein, 360 aa, Oryza sativa
MKKASSLSELGFDADGPSFFRHLTLTDGDDGTLPRRRLIKISVIGAGNVGMAIAQTILTQDLADEIVLIDAVADKVRGEMLDLQHAAAFLPRVNIVSGTEVSLTRSSDLVIVTAGARQIPGETRLNLLQRNVSLFRKIVPAAAEASPESVLVIVSNPVDVLTYVAWKLSGFPASRVIGSGTNLDSSRFRFLLAEHLEVSAQDVQAYMVGEHGDSSVALWSSISVGGMPVLAHLQKNHRSAATAKKFDEAALEGIRRAVVGSAYEVIKLKGYTSWAIGYSVASIAWSLLRDQRRIHPVSVLAKGLVRGVPADRELFLSLPARLGRAGVLGVAAELVLTDEEERRLRISAETLWGYCHALGL

SEQ ID NO: 171 - DNA, 1125 bp, Oryza sativa
atggcgcgcgaggcggagaaggacgcggcggcggcggcggagatcccgctgctgacgccgtacaagatggggcggttcgagctctcccaccgtgtggtgctcgcgccgctcacgcggaaccgctcctacggcaacgtgctgtactacacgcagcgcgccaccagcggcggcctcctcgtcacggaggccaccggcgtctccgacaccgcgcagggctacccggacacccccggcatctggacgcagcagcaggtcgaggcgtggaagcccatcgtcgacgccgtccaccgcaagggcgccctcttcatctgccagctctggcacgtcggcagggtctccaccaacgaataccaacctgacgggcaggcgcccatctcaagcacagacaggcagatcacaccggacgattcaggcatcgtctactcgaaaccccgacggctgaggacggaggagatccctcagatcatcgacgacttcaggcgagccgcgcggaacgccatcgaggccgggttcgacggcgtggagatccacggcgcgcacggctacctcctggagcagttcatgaaggacagcgccaacgaccgcagcgacgagtacggtggcagcctcgagaaccggtgccgcttcgttgtcgaggtgatcgacgccatcgtcgccgaggttggagcgcaccgtgtggggatcaggctgtcaccgttcatcgactatatggactgcgtcgactccgacccggtggctctcggctcgtacatggtgcagcagctcaacaagcacccggggtttctctactgccacatggtggagccaagaatggccatcgtggaaggacgcaggaagatcacccatggcctcctgccattccggaagctgttcaatggcactttcatcgctgccggaggatacgatcgggaggaaggaaacaaggtgatagccgatggatatgctgacctcgtcgcctacgggaggcacttcttggccaatccggacttgcccaagaggttcgcgatcaacgcaccattgaacaagtataataggtccaccttttacatacaggatcctgttgttggctacacggactatcctttccttgatgagaaagacgagggcgctgctacttatgcttaa

SEQ ID NO: 172 - protein, 374 aa, Oryza sativa
MAREAEKDAAAAAEIPLLTPYKMGRFELSHRVVLAPLTRNRSYGNVLYYTQRATSGGLLVTEATGVSDTAQGYPDTPGIWTQQQVEAWKPIVDAVHRKGALFICQLWHVGRVSTNEYQPDGQAPISSTDRQITPDDSGIVYSKPRRLRTEEIPQIIDDFRRAARNAIEAGFDGVEIHGAHGYLLEQFMKDSANDRSDEYGGSLENRCRFVVEVIDAIVAEVGAHRVGIRLSPFIDYMDCVDSDPVALGSYMVQQLNKHPGFLYCHMVEPRMAIVEGRRKITHGLLPFRKLFNGTFIAAGGYDREEGNKVIADGYADLVAYGRHFLANPDLPKRFAINAPLNKYNRSTFYIQDPVVGYTDYPFLDEKDEGAATYA

SEQ ID NO: 173 - DNA, 411 bp, Oryza sativa
atggctcgcaagaatctccttctgcttggtgtcttcctatctgctctgcttttcttcttcctggatgtagctcacgcaagagagctcgctgaagccagtgaatctgaggggaagaatgtgaagccaacaggtaggtcaggggtcgaggatcagaagtggggcggtgctcatggaggaggatatggatatggcggcgggtatggtggaggaggatatggtcatcctgggtatggtggtggctatggtggtggatatggccaccctggatatggcggtggctacggaggtggatacggccaaggatatggctgtgggtatggtcatcctggtcacagtggaggatacggtggtgggggtggctacggtggtggtggaggttatggaggaggacatggtggtggttggccttaa

SEQ ID NO: 174 - protein, 136 aa, Oryza sativa
MARKNLLLLGVFLSALLFFFLDVAHARELAEASESEGKNVKPTGRSGVEDQKWGGAHGGGYGYGGGYGGGGYGHPGYGGGYGGGYGHPGYGGGYGGGYGQGYGCGYGHPGHSGGYGGGGGYGGGGGYGGGHGGGWP

SEQ ID NO: 175 - DNA, 1407 bp, Oryza sativa
atgccgacggctgcgtcggagcgcgacggcggcggccgtgccgcgctgggcaaggcggcagcggggctcgccgcggcggccgtggtgtcgctgaccgggctcgccgcggagcccctctcgccgccgccgccggcgcgggccgagtcgctcaccgtcgcgttccctgtctccaaggcccgcgaggtgaaccgggtgcagaggacgctggtggaggcgtgggggctgatccgtgagaccttcgtggatcccaccttcaatcaccaagattgggacatgagactgcagcagaccatggtggagatgttcccgctgaaatcggaggatgccgcctatggtaagatcagcgggatgctgtccacactcggcgatccgttcaccaagatcatcagccccaaggaatatcagagtttcaggattggaagcgatgggagtgtccaaggggttggggtgttcataaacaaggagcctagctctggacgcttgcttgttatggactgcattgaaggtggcccagcagatcgagcaggcctgcatggaggcgatgaactagttgagatcgatgggaagagtgtttctgggttggatggagaagctgcagctcagagacttagaggtcgtgttggaacaactgtgaaagtgaaagtgttggatggcactgaaaacgaaaggaatggtaggataagacaaaaggaggtccagctatctcgtgaggttatcaatctttcacctctatcaacagcaattatctctcataggtcggacgatggccgtgagtgcaaaactgggtatgttaggctagctgcattctctcagactgctgcagctgaaatggaaagtgccattaagaagatggaggatgagggtgtccagtcatatattttagatctgcgaaataatcctggtggtctagtaaaagcaggtcttgacgtggctcaaatgtggttggatggaaatgaaactcttgtcaacactgttgaccgtgagggaaatgtcctaccaataaatatggcccggggccattctttaacacatgatccccttgtcgtacttgtcaatgaaggaagtgcaagtgcaagtgaaatcttggcaggagcattacatgacaatggtcgtgctattttggtcggccacagaacttttggaaaaggaaaaatacagagtgtgactgaattggatgatggatctgctctgtttatcacggtcgcaaaatatctctctccagcactgcatgaaatcgaccaagtaggcatccaacctgacatacaatgcacccctgaaatgttatctttgccaagagcaccttcgctaaaagaggacgacaaagccacaaatctggagatggattcatgtatcatggtggcagagcaagcattggaaattgagaaatcaaagggatctgcttcgtag

SEQ ID NO: 176 - protein, 468 aa, Oryza sativa
MPTAASERDGGGRAALGKAAAGLAAAAVVSLTGLAAEPLSPPPPARAESLTVAFPVSKAREVNRVQRTLVEAWGLIRETFVDPTFNHQDWDMRLQQTMVEMFPLKSEDAAYGKISGMLSTLGDPFTKIISPKEYQSFRIGSDGSVQGVGVFINKEPSSGRLLVMDCIEGGPADRAGLHGGDELVEIDGKSVSGLDGEAAAQRLRGRVGTTVKVKVLDGTENERNGRIRQKEVQLSREVINLSPLSTAIISHRSDDGRECKTGYVRLAAFSQTAAAEMESAIKKMEDEGVQSYILDLRNNPGGLVKAGLDVAQMWLDGNETLVNTVDREGNVLPINMARGHSLTHDPLVVLVNEGSASASEILAGALHDNGRAILVGHRTFGKGKIQSVTELDDGSALFITVAKYLSPALHEIDQVGIQPDIQCTPEMLSLPRAPSLKEDDKATNLEMDSCIMVAEQALEIEKSKGSAS

SEQ ID NO: 177 - DNA, 2082 bp, Oryza sativa
atggagcatgcaaggagatttccaacagatcccaaagaatataaattatgtgaggaagttggagatggtgttagtgctacggtgtacaaagctctttgtatcccacttaatattgaagttgccattaaagttcttgaccttgagaagtgcagtaatgacctggatgggataagacgagaagtacaaaccatgagcttgattgatcatccaaatcttcttcgagcatattgctcgtttacaaatggtcatcagctttgggttattatgccttacatggccgctggatctgctctgcacattatgaaaacttcttttccagatgggtttgaggagccagtcattgcaactcttttgcgggaggttcttaaagctcttgtctacctacactcccaagggcatattcacagagatgtaaaggctggaaatatcctaatagatacaaatggagctgtcaagctaggagactttggagtgtcagcctgcatgtttgatactgggaataggcaaagagcacgaaacacttttgtagggaccccttgctggatggctccagaagttatgcaacaactgcatggttatgattacaaagctgacatttggtcctttggtataacggcattggaactagcacatggtcatgctccattttcaaagtaccctccaatgaaggtattgcttatgaccttgcaaaatgcaccaccaggtctagactatgagagggacaagcgattttcaaagtctttcaaggatttggttgcaacttgcttagtcaaggatccacgcaagcgtccatcttcagaaaagctcttgaagcattctttttttaagcatgcacgtacagctgaatttcttgcacgaagtattcttgacggcctccccccgctgggtgaacgctttaggacattgaagggaaaagaggctgacttgcttcttagtaataagcttggttcagagagcaaggagcaactatcacagaaagagtacatacgaggaatcagtggttggaacttcaatctggaggacttgaaaaatgcagccgcccttatagacaatacaaacggaacgtgccatttagatggtgttaacagcaaattcaaggatggtttacaagaagctaatgaaccagaaaatatttaccagggacgggctaaccttgttgcttctgcaaggcctgaggatgagatacaagaggtcgaagatctggatggtgctctcgcctcttctttccccagccgcccccttgaggcactaaaatcttgctttgatgtttgtggggatgatgatccccctactgctactgatttgagggagcaaccaaatatggaatctacatcacctatgcagcagttccaacaaattgagaatcataaaagtgccaactgtaatggtgaaagtttggaaagaagtgcctctgtaccatcaaatttggtcaatagtgggtcccacaagttcttaagtggttccctgatacctgaacatgttctttctccttacaggaatgttggcaatgacccagcaaggaatgagtgtcatcagaaaaatacatgcaacaggaaccgcagtgggcctttattccgccaaatgaaagatccacgcgcacatctgcctgttgaacctgaggagcaatccgaaggaaaagttatccagcgaagggggcgttttcaggttacatcagatagtattgctcaaaaggtagcttcatccgcaagcagcagtaggtgctcaaatttaccaatcggagtaacacgatcaactgtccatccatcgacaattcttccaacactacaattcatgatacagcaaaatactatgcaaaaggaagtgataagtagactgatttcttcaattgaggaaatatctgatgctgctgatgcaagtacaactggttcatctcagccatctggagtgcatttcagagagaaggaactgcagtcgtacatcgccaacttgcagcaaagtgtcaccgaacttgctgaggaagttcagagattaaagctcaaaaacactcagctcgaggagcagatcaatgcattgcccaaaaaagatgaaaggttacgaagagaggatacccgacaacaatga

SEQ ID NO: 178 - protein, 693 aa, Oryza sativa
MEHARRFPTDPKEYKLCEEVGDGVSATVYKALCIPLNIEVAIKVLDLEKCSNDLDGIRREVQTMSLIDHPNLLRAYCSFTNGHQLWVIMPYMAAGSALHIMKTSFPDGFEEPVIATLLREVLKALVYLHSQGHIHRDVKAGNILIDTNGAVKLGDFGVSACMFDTGNRQRARNTFVGTPCWMAPEVMQQLHGYDYKADIWSFGITALELAHGHAPFSKYPPMKVLLMTLQNAPPGLDYERDKRFSKSFKDLVATCLVKDPRKRPSSEKLLKHSFFKHARTAEFLARSILDGLPPLGERFRTLKGKEADLLLSNKLGSESKEQLSQKEYIRGISGWNFNLEDLKNAAALIDNTNGTCHLDGVNSKFKDGLQEANEPENIYQGRANLVASARPEDEIQEVEDLDGALASSFPSRPLEALKSCFDVCGDDDPPTATDLREQPNMESTSPMQQFQQIENHKSANCNGESLERSASVPSNLVNSGSHKFLSGSLIPEHVLSPYRNVGNDPARNECHQKNTCNRNRSGPLFRQMKDPRAHLPVEPEEQSEGKVIQRRGRFQVTSDSIAQKVASSASSSRCSNLPIGVTRSTVHPSTILPTLQFMIQQNTMQKEVISRLISSIEEISDAADASTTGSSQPSGVHFREKELQSYIANLQQSVTELAEEVQRLKLKNTQLEEQINALPKKDERLRREDTRQQ

SEQ ID NO: 179 - DNA, 1605 bp, Oryza sativa
atggccgcggcgcctatgagcttcgcttttacgctgctcgcggcttgcatttccttcttgcaccacgcgccggccgccgccgcagccgctccggcgaaccagaccgccggctttctcgactgcctcgccgcgagcctccctgccggcgtcgtctacacgcacgcgtcccggtcgtaccagtccgtcctcgagtcctccatcaagaacctcctcttcgacacgccggccaccccgacgccggtcgcggtcgtcgaggccaccgacgcctcgcacgtccaggccgccgtgcgctgcggcgtcggccatggcgtctccgtccgctcccgcagcggcgggcatgactacgagggcctgtcctaccgctccctcgacgcggcccgcgccttcgccgtcgtcgacatggcgggcggcgcgctccgcgcggtccgcgtcgacgtcctcggccgggcggcgtgggtcggctccggcgcgacgctcggcgaggtgtactacgccatcgccaacaagacctcccgcctcgggttccccggcagcgtcggcccgacggtcggcgtcggcgggttcctcagcggcggcggcttcggcctgatgctgcggaagcacggcctcgcctccgaccacgtcctcgacgccaccatggtggaggccaaggggaggctcctcgacagggccgccatgggcgaggacctcttctgggccatccggggcggcggcggcggcaacttcgggatcgtcctgtcctggaagctccggctcgtccccgttccggccaccgtcacggtgttcaccgtccaccgctcaaggaaccagtccgccaccgacctcctcgccaagtggcagcgcgtggcgccgtccctccccagcgacgccttcctccgcgtcgtcgtgcagaaccagaacgcgcagttcgagtccctgtacctcggcacgcgcgccggcctcgtcgccgccatggccgacgccttcccggagctcaacgtgacggcgagcgactgcatcgagatgacgtgggtccagtccgtgctctacttcgcgttctacggcacggggaagccgccggagatgctcctggacaggggcaccggcaggccggacaggtacttcaaggccaagtccgactacgtccaagaacccatgcccagccaggtctgggagaccacctggagctggctcctcaaggacggcgccggactgctcatcctcgacccctacggcggcgagatggctcgcgtcgcgccggcggcgacgccgttcccgcaccggcaggcgctctacaacatccagtactacgggttctggtcggagagcggggaggcggcggcggcgaagcacatgggctggatcagaggggtgtacggggagatggagccgtacgtgtccaagaaccccaggggcgcctacgtcaactacagggacctcgacctcggcgtgaacgacgatggcgacggcggcggcggcgtggcgagggcgaggtatgagaaggcgacggtttgggggagagcgtacttcaaggccaactttgagcggctcgcggcggtgaaggccaaggtggatcctgacaactacttcaagaacgagcagagcattccaccacttccgagttag

SEQ ID NO: 180 - protein, 534 aa, Oryza sativa
MAAAPMSFAFTLLAACISFLHHAPAAAAAAPANQTAGFLDCLAASLPAGVVYTHASRSYQSVLESSIKNLLFDTPATPTPVAVVEATDASHVQAAVRCGVGHGVSVRSRSGGHDYEGLSYRSLDAARAFAVVDMAGGALRAVRVDVLGRAAWVGSGATLGEVYYAIANKTSRLGFPGSVGPTVGVGGFLSGGGFGLMLRKHGLASDHVLDATMVEAKGRLLDRAAMGEDLFWAIRGGGGGNFGIVLSWKLRLVPVPATVTVFTVHRSRNQSATDLLAKWQRVAPSLPSDAFLRVVVQNQNAQFESLYLGTRAGLVAAMADAFPELNVTASDCIEMTWVQSVLYFAFYGTGKPPEMLLDRGTGRPDRYFKAKSDYVQEPMPSQVWETTWSWLLKDGAGLLILDPYGGEMARVAPAATPFPHRQALYNIQYYGFWSESGEAAAAKHMGWIRGVYGEMEPYVSKNPRGAYVNYRDLDLGVNDDGDGGGGVARARYEKATVWGRAYFKANFERLAAVKAKVDPDNYFKNEQSIPPLPS

SEQ ID NO: 181 - DNA, 1512 bp, Oryza sativa
atggagtcgctgctcgcagccggtgcgggagggatcggcgtggctgcggcggccgccgtcgtggcggcgaccctcgccgtggtgccgcccaaggaccgcggcaacaacccgcctccagctgttcctggtttacccgttattggaaatatgcatcaattgaaagaaaagaagcctcatcatacctttacaaaatggtctaaaacttatgggccaatctacactataaagaccggagcttcttcagtagttgtgctcaattcaacggaagtagccaaggaggcgatgattgaaaaattctcatcaatatcaactaaaaagctaccaaaagcattgtctgtgataagccgtaaaaacatggtttccatcagcgactatggtgacttctataagatggcgaagcgtaatattatgctcgcaattttaggttttaatgcgcagaaacacttctgcgatacaagagaaaggatggtcagtaacgtgttaagcagtttgcataaattggttgctgttgacccacattcccctctgaacttcagagaagtttacactactgagctattcggattgtccttgatccagaatttaggtgaggatgtgtgttcagtttatgtggaagagtttgggagggagatatccaaggaagagatcttccatgtccttgtgcatgagatattgtcgtgtgtcgtggagcctgattggagggactacttcccctacctcagctggcttccaaacaagagcttcgaaacaatagtgtctagtacagaatttagacgagatgctgtgatgaacgcgttgatcaagaggcagaaggaaaggattgcgcgcggagaggcaaggatatcctatattgacttcttgctggaagctaagaacagtacacagctgacagatcaccaactgatgctgctgctggcggagtccatcgctgctgctgtggatactgtcctggtaaccactgaatgggccatgtatgagcttgccaagaaccctgacaaacaggaatggctttaccgggagattcgagaggtgtgcggcggcaaggcggtgaccgaggaggacctaccaaggctgccgtacctcgacgccgtgctccacgagacgctgcggctgcactccccggtgccggtgctccccacgaggttcgtccacgacgacaccacgctcgccggctacgacgtccccgcgggcacccaggtgatgatcaacgtgttcgggtgccacatggacgaggaggcctgggagtcgcccggagagtggtcgccggagagattcctcggcgaggggttcaagttggccgacaggtacaagacgctggcgttcggcgccgggaggaggacctgcgcggggagccagcaggcggtgagcatcgcgtgcgtcgccatcgcgcgcttcgtgcaggagctccagtggacgctgagggagggcgacggtgataaggaggataccatgcagtacactgccttgaagcttcacccgctgcacgtgcacctcaagcccagaggaagctag

SEQ ID NO: 182 - protein, 503 aa, Oryza sativa
MESLLAAGAGGIGVAAAAAVVAATLAVVPPKDRGNNPPPAVPGLPVIGNMHQLKEKKPHHTFTKWSKTYGPIYTIKTGASSVVVLNSTEVAKEAMIEKFSSISTKKLPKALSVISRKNMVSISDYGDFYKMAKRNIMLAILGFNAQKHFCDTRERMVSNVLSSLHKLVAVDPHSPLNFREVYTTELFGLSLIQNLGEDVCSVYVEEFGREISKEEIFHVLVHEILSCVVEPDWRDYFPYLSWLPNKSFETIVSSTEFRRDAVMNALIKRQKERIARGEARISYIDFLLEAKNSTQLTDHQLMLLLAESIAAAVDTVLVTTEWAMYELAKNPDKQEWLYREIREVCGGKAVTEEDLPRLPYLDAVLHETLRLHSPVPVLPTRFVHDDTTLAGYDVPAGTQVMINVFGCHMDEEAWESPGEWSPERFLGEGFKLADRYKTLAFGAGRRTCAGSQQAVSIACVAIARFVQELQWTLREGDGDKEDTMQYTALKLHPLHVHLKPRGS

SEQ ID NO: 183 - DNA, 222 bp, Oryza sativa
atgagggagctgatgcggaggatgagcttctctgaccgcgttggcggcggcggcggcggcgacggcggcggcggcggcgcggcggcggccgtgaagcgcgggctgatgaggaggctgagcttctcggaccgccgccaagagctaattaatccgttgttattaaccgcgatctcagctcgattaattgatgaattaattgagcaaattaagcagatgagatga

SEQ ID NO: 184 - protein, 73 aa, Oryza sativa
MRELMRRMSFSDRVGGGGGGDGGGGGAAAAVKRGLMRRLSFSDRRQELINPLLLTAISARLIDELIEQIKQMR

SEQ ID NO: 185 - DNA, 915 bp, Oryza sativa
atgagcgggatgaattcgctgagcatggtggaggcgaggctgccgccggggttcaggttccacccgcgagacgacgagctcgtgctggactacctggaaaggaagctcctcgacggcggcgtgggcggcgccgcggcggcggcggcggcggtcaccatctacggctgcccggtgatggtcgacgtcgatctcaacaagtgcgagccatgggaccttcctgagatcgcttgcgttggtggcaaggagtggtacttctatagccttagggataggaagtatgcaactggccaacgaacaaatagagcaaccgaatcgggctactggaaggccacaggaaaagatcgcccaataagccggaaaggattgctcgtcggtatgcgaaaaaccctggtgttctacaaaggtagagcccctaaggggaagaagaccgagtgggtcatgcatgaattccgcaaagaaggacaaggggatccgatgaagttgcctctcaaggaggactgggtcttgtgtagagtcttctacaagagtaggacaaccattgccaagctgccaacggagggtagctacaacaatattgacagtgtggccacaacttcactgcctcccctcactgacaactacattgcatttgatcagcctggttcaatgcaaaacctagagggttatgagcaagtgccctgcttctccaataatccctctcaacagccatcgtcgtcgatgaatgttccgttgacatcggccatggttgatcaagagcaaaacaatatgggtagggcgatcaaggatgtgctgagccaattcaccaagtttgaaggcaatgtgaagagggaggcccttcaaagtaatttttcccaggatggatttgattacttggctgagagtggcttcacacaaatgtggaactcactcagttga

SEQ ID NO: 186 - protein, 304 aa, Oryza sativa
MSGMNSLSMVEARLPPGFRFHPRDDELVLDYLERKLLDGGVGGAAAAAAAVTIYGCPVMVDVDLNKCEPWDLPEIACVGGKEWYFYSLRDRKYATGQRTNRATESGYWKATGKDRPISRKGLLVGMRKTLVFYKGRAPKGKKTEWVMHEFRKEGQGDPMKLPLKEDWVLCRVFYKSRTTIAKLPTEGSYNNIDSVATTSLPPLTDNYIAFDQPGSMQNLEGYEQVPCFSNNPSQQPSSSMNVPLTSAMVDQEQNNMGRAIKDVLSQFTKFEGNVKREALQSNFSQDGFDYLAESGFTQMWNSLS

SEQ ID NO: 187 - DNA, 1356 bp, Oryza sativa
atggcttccatgccgcagctggaggaaaaggattcatccgatttggcaatcaacaaaggcccgtcgctggatcttgtcaaatctcccttgatgatgaatgatgcatctgcaactgtaactgcaatgcagcccaacgaggggatggaggagttccctgtcaaggttcggaagccttacacgatcaccaagcagcgggagaagtggacggaagaagagcacgacaagttccttgaggcattgaagctgtatggtcgctcttggcgtcagatacaagagcacattggcacaaagactgctgtccaaattcggagccatgcccagaagtttttctcaaaggtggtgcgtgagcccggttccaataatgcgattgagatccctccacctaggccaaagagaaaaccacttcatccgtaccctcgaaagtgtgcgaattctggatcggacgcaaatccagcaacagcgcaattgaagcttgctcctggctcatcttcatctggctctgatcaagagaatggttctcctatatcggtgctatctgcgatgcagtcagatgcttttggatcgtcagtatccaatccatcaaccagatgtacctccccagcgtcatctgacgatggaaataacattcccacattcacgagtggggaagataataatgtgccttgtgaaccaacagtgatagatccgtcccagtcccacaaggaaatagaccaagatagaaaagacgtgaataatatgtctgaagaggattcttcagaagaagaggtgcaagaaacaagcttgaagctatttgggaggacagttgtcatcccagatccaaggaagagaagctcctcagatccgaagcatgaaagtgaggagcagatatcacagccttccaatgaagaaatgttgcaggcttcttcatcggttggggagattccagcggcatattgtgcaccaaatggttggtttatgtcatacaattctttcccattccaattcggtgaatcagcggcagatgctagaattccccctttacacgtgtggtggccttactacggttttgctcccattagccatcctagaggactaagcacagtgatgcagcagactgaaggtagtgacgagagtgacggtgtgaagagccactcatccgaatcaagttcggactccggggaaaatgtgcagatgaccgctccccagagctcgagaatagtggaatcacttggagcgatttacgtccgagactcaggttcaagttttgagctaaaaccgagcgcaaattcagcgtttgtaagagtgaagccaagcaacagcggagatgaagaggtaataaggggatttgtgccttataaaagatgcaaatttcaataa

SEQ ID NO: 188 - protein, 451 aa, Oryza sativa
MASMPQLEEKDSSDLAINKGPSLDLVKSPLMMNDASATVTAMQPNEGMEEFPVKVRKPYTITKQREKWTEEEHDKFLEALKLYGRSWRQIQEHIGTKTAVQIRSHAQKFFSKVVREPGSNNAIEIPPPRPKRKPLHPYPRKCANSGSDANPATAQLKLAPGSSSSGSDQENGSPISVLSAMQSDAFGSSVSNPSTRCTSPASSDDGNNIPTFTSGEDNNVPCEPTVIDPSQSHKEIDQDRKDVNNMSEEDSSEEEVQETSLKLFGRTVVIPDPRKRSSSDPKHESEEQISQPSNEEMLQASSSVGEIPAAYCAPNGWFMSYNSFPFQFGESAADARIPPLHVWWPYYGFAPISHPRGLSTVMQQTEGSDESDGVKSHSSESSSDSGENVQMTAPQSSRIVESLGAIYVRDSGSSFELKPSANSAFVRVKPSNSGDEEVIRGFVPYKRCKFQ

SEQ ID NO: 189 - DNA, 498 bp, Oryza sativa
atggcaacctccagcttgctagtagctgcagtgctcgcggcggcggccatggcggcgacggcgcagaactcggcgcaggactacgtggacgcgcacaacgcggcgaggtccgacgtcggggtggggccggtgagctgggacgacacggtggcggcgtacgcggagagctacgcggcgcagcggcagggcgactgcgcgctggagcactcggactccggcgggaagtacggcgagaacatcttctggggctccgccggcggggactggacggcggcgagcgcggtgtcgtcgtgggtggcggagaagcagtggtacgaccacgacagcaacagctgctcggcgccggcggggagctcgtgcgggcactacacgcaggtggtgtggagcaactcgacggcgatcggctgcgcccgcgtcgtctgcgacaacagcctcggcgtcttcatcacctgcaactactcgccgccgggcaacgtcgacggcgaatctccctactag

SEQ ID NO: 190 - protein, 165 aa, Oryza sativa
MATSSLLVAAVLAAAAMAATAQNSAQDYVDAHNAARSDVGVGPVSWDDTVAAYAESYAAQRQGDCALEHSDSGGKYGENIFWGSAGGDWTAASAVSSWVAEKQWYDHDSNSCSAPAGSSCGHYTQVVWSNSTAIGCARVVCDNSLGVFITCNYSPPGNVDGESPY

SEQ ID NO: 191 - DNA, 1068 bp, Oryza sativa
atggatcagagctttgggaatcttggaggaggaggaggagcaggggggagcggcaaggcggcggcgtcgtcgttcctgcagctgccgctgtccacggcggcggcggccaccgcgtactacggcacgccgctcgccttgcaccaggcggcggccgcggctggcccgtcgcagtaccacggtcacggtcacccccaccacggcggcggccaccaccacagcaagcacggcggcgccggtggtggggagatctcggcggcggaggccgagtccatcaaggccaagatcatggcgcacccccagtactccgccctcctcgcagcctacctcgactgccagaaagtcggagcgccgccggaggtgctggagaggctgaccgccacggcggcaaagctggacgcccgccctcccggccgccacgacgcgcgcgacccggagctcgaccagttcatggaggcgtactgcaacatgctggccaagtacagggaggagctgacgcggccgatcgacgaggccatggagttcctcaagagggtggagtcgcagctcgacaccatcgccggcggcgcccatggcggcggcgccggctcggcgcgcctcctcctcgccgatggtaaatctgaatgtgttggttcttctgaggatgacatggacccaagtggccgcgaaaacgagccgcctgagatcgacccgcgcgctgaggataaggagctcaagtttcagcttctgaagaagtacagtggctacttgagcagcctaaggcaagaattttccaagaaaaagaagaaaggaaagctgcctaaggaggccaggcagaagctgcttcactggtgggagctgcactacaagtggccttacccctcagagacggagaagattgcgcttgcggaatcgacaggactagatcagaagcagatcaacaactggttcatcaaccagaggaaacggcactggaagccatcggaggacatgccgttcgtcatgatggaaggttttcacccacagaatgctgctgcattgtacatggatggcccgttcatggcagatggaatgtaccgcctcggttcgtga

SEQ ID NO: 192 - protein, 355 aa, Oryza sativa
MDQSFGNLGGGGGAGGSGKAAASSFLQLPLSTAAAATAYYGTPLALHQAAAAAGPSQYHGHGHPHHGGGHHHSKHGGAGGGEISAAEAESIKAKIMAHPQYSALLAAYLDCQKVGAPPEVLERLTATAAKLDARPPGRHDARDPELDQFMEAYCNMLAKYREELTRPIDEAMEFLKRVESQLDTIAGGAHGGGAGSARLLLADGKSECVGSSEDDMDPSGRENEPPEIDPRAEDKELKFQLLKKYSGYLSSLRQEFSKKKKKGKLPKEARQKLLHWWELHYKWPYPSETEKIALAESTGLDQKQINNWFINQRKRHWKPSEDMPFVMMEGFHPQNAAALYMDGPFMADGMYRLGS

SEQ ID NO: 193 - DNA, 2139 bp, Oryza sativa
atgggggcgggacacagaggagggagcggcgaacttcgtgagggagcaggagagaacttcggcgaactccctccggcgcaggagggtctccgcggcacccccattccatcacctgccatgaaatacacctttcttctcttcctttgccttgtatcctttgtcacttctagtgagcaccagtttgtcttctccggcttcaccggcagcaacctcgtccttgatggtgccgccaccatcaccgaagatgggctccttgagctcaccaatggcgcgaataatatcgaaggccatgcgttctacccaactccgttgcgctttcgcaagtcgccaaacgacatggtacaatctttctcggtttcatttgcgttcagcatcctccaaaaatatgccaatcggagcaacgatggcatggccttcttcatagcaccaagcaagaacttctctgatgcatcattgcctgcacaatatttgggcctcctcaacaaccaaaacaatggcaatagaagcaacgatttgttcgccgtcgagctcgacaccttccaaaacaaggagttccaagacatggatgacaaccatgtagggatcaatgtcaacagcatgaagtccttggatgcacactatgctggtttctatgaagacaggagtggcatcttcaggaaccttactcttgtcatccatgaggcaatgcaagtttggtttgattatgatggtgatgccaagaagattagtgtcaccttggctcctgccagattggccaagcccaagagacctctactgtctgtcacctacgacctctcaacggtggttgcagattcagcctacatcggtttctcagctgcaactggaggtgtagtcaacacaaaacactgtgttcttggatggagctttaggatgaatggccctgctcaagctattgatatctccaggttgcccaagctgccaaatcttggcagcaagaagtcccattcttctaggatcttggtaatcatatcaccggtggcaaccgctgtattgattttccttgttggtgttctccttgttctctgtgtacggaggcgactcaagtacacagagattcaagaagattgggaggttgagtttggtccgcatcgtttctcatacaaggttctgtatgatgccactgaaggatttaaggataagaacttacttggtgtcggaggatttgggaaggtgtataagggagtgcttccggtgtctaaacgagtggttgccgtgaagtgtgtttcgcatgagtcgagccaaggtatgaaggagtttgttgctgagattgtcagtatcggtcaacttcgacaccgaaaccttgtgcagttgctcggttattgtaggaggaaaggtgaactccttctggtctatgactatatgtcaaacggtagccttgacaactatttgtattgtgatttgaccgagccaacattggattgggcacagagatttaacattgtcaaaggtgtcacgtcaggactactctacctccatgagaaatgggggaagattgtaatccaccgagatatcaaggcaagcaacgtgcttcttgataaagatatgaatgcacgattaggtgactttggcctctcaagattatatgaccacggaaccgacccacaaactacgcacctggtaggcacaatggggtacctagccccagagctagtgttcacaggcaaggcatctcctgccacagacatatttgcctttggcgtattccttctcgaagtcacttgtggacaaaggccactcaacaacaatcaacaagataatcaacccccaatgctggttgattgggtccttgagcactggcagaaaggattactgcctgagacagtagacaaaagattgcagggcaactacaatgttgatgaggcatgtctagtgctgaagctaggtctattgtgttctcacccaatcgccatggaaaggcctaccatgagtcaagtccagagatacctcgacggcgacgcgccgctgccagagttggcaccgtcggagctgaagttcaacatggtggctctcatgcagggccaaggcttcgactcgtatgtcttgccatgtctgtctttgtcgtcggtggtgagcattgaaacctcacccgaggtagacgatgacactgctagtgtttga

SEQ ID NO: 194 - protein, 712 aa, Oryza sativa
MGAGHRGGSGELREGAGENFGELPPAQEGLRGTPIPSPAMKYTFLLFLCLVSFVTSSEHQFVFSGFTGSNLVLDGAATITEDGLLELTNGANNIEGHAFYPTPLRFRKSPNDMVQSFSVSFAFSILQKYANRSNDGMAFFIAPSKNFSDASLPAQYLGLLNNQNNGNRSNDLFAVELDTFQNKEFQDMDDNHVGINVNSMKSLDAHYAGFYEDRSGIFRNLTLVIHEAMQVWFDYDGDAKKISVTLAPARLAKPKRPLLSVTYDLSTVVADSAYIGFSAATGGVVNTKHCVLGWSFRMNGPAQAIDISRLPKLPNLGSKKSHSSRILVIISPVATAVLIFLVGVLLVLCVRRRLKYTEIQEDWEVEFGPHRFSYKVLYDATEGFKDKNLLGVGGFGKVYKGVLPVSKRVVAVKCVSHESSQGMKEFVAEIVSIGQLRHRNLVQLLGYCRRKGELLLVYDYMSNGSLDNYLYCDLTEPTLDWAQRFNIVKGVTSGLLYLHEKWGKIVIHRDIKASNVLLDKDMNARLGDFGLSRLYDHGTDPQTTHLVGTMGYLAPELVFTGKASPATDIFAFGVFLLEVTCGQRPLNNNQQDNQPPMLVDWVLEHWQKGLLPETVDKRLQGNYNVDEACLVLKLGLLCSHPIAMERPTMSQVQRYLDGDAPLPELAPSELKFNMVALMQGQGFDSYVLPCLSLSSVVSIETSPEVDDDTASV

SEQ ID NO: 195 - DNA, 2085 bp, Oryza sativa
gtgaagctcatctgcctcctcctccttgccggagctagcctcgccgcgtgcaccgccggcgacggcaacgacgacgaccaccagttcgtttactcaggcttcaccggcagcaacctcaccctcgacggagccgccgtgatcacgcgcaccggccttctcgagctcaccaatggcacgctccgccagaaagcccacgccatccatccggccccgttccgcctccgcggcggctcgtcgtcgtcgtcgacggcgacggcgacggcgacggcgacggcgacggcgacacggtccttctcggcgtccttcgtgttcgccatcctatgccccgacgccgacgcctgcggccacggcatcgtcttcttcgtcgcaccggccaaccacagcttctccggcgcgttccccagccagtacatcggcctcttcaacggcagcagcgacggcgacgccgggaaccacctcgtcggcgtcgagctcgacaccgaccagaacaacgagttccgtgatatcgacggcaaccacatcggcgtcgacatcaacagcctcacctccattaactcaaccagcgccggctactacgacgacaacgacggcggcaactccggcgaccatggcttccacaacctgacgctggcgagccacggcgaggccatgcaagtgtgggtcgattacaacggcacggccaagcagatcaccgtcgccatggctcccctcaagatggccaagccttccaagccattgttgtcttctacctacgacctctccacggtgttcgtcgccgacgagccctacatggtgggcttctcgtcggcgacgggttctttcaactccagacactacgttctcggttggagcttcgccatggatggacctgctccggccatcgacatcgacaagctgcccaagctgcctcgcttcgcccccaagcacaagcccaagatggtagagataattccgccattggcgacggctacattcatcgtcgcattgggaaccgtctctgttcttctgatacggagacggatgaggtacaccgagttgcgggaagattgggaggttgagtttggaccgcatcggttctcctacaaggacttgttccgcgccacggatggattcaagagcatgaatctggttggtgtcggaggatttgggagagtatacaagggagtgcttcaatcatctaaattggagattgctgtcaagagggtatcacatgattcgaagcaaggcatgaaagagttcattgcggaggttgttagcataggtcgactacagcatcgtaatcttgttcagttacttggttattgcaggcgaaaaggtgaacttcttttggtgtatgagtatatggcgaatggaagtcttgataaacacttgtacagtgaaggtgataagcgggttttagattgggatcaaagacttcaaatcatcaaaggaattgcatctggtttgctctaccttcacgaggagtgggagaaagtgatcgtccaccgggatattaaaacaagcaatgtcctcctcgacagcgagatgaatagtcgattaggtgactttggcttggcaaggctttatgaccgtggtgcagacccactgaccactcatgtggttggtaccataggatacctagcgccagaactaggccgtagcagcaaggccactcctttgactgatatatttgcttttggcatatttattctcgaggttacttgtgggcgaagaccaatcatgcaagttccagagggcgaacaacatgtgttggttgactgggtgctcgagcattggcacaaaggatcaataactgagatagtggatacaaagctccatggaaactataatgtagatgaggtatgtctagtactaaagcttggattattatgctcacatcctctctccaatgcaaggcccaatataaggcaagtgatgaagtacctaactggagacatggcaatgccagaactggtgccaacacaccacagctttcatacacttgcactgatgcagaaccaaggattcgactcatacgtcatgtcatacccttcatcaacggcaagcatgagcgccatgtccaacaacctttcagcacaaagatga

SEQ ID NO: 196 - protein, 694 aa, Oryza sativa
VKLICLLLLAGASLAACTAGDGNDDDHQFVYSGFTGSNLTLDGAAVITRTGLLELTNGTLRQKAHAIHPAPFRLRGGSSSSSTATATATATATATRSFSASFVFAILCPDADACGHGIVFFVAPANHSFSGAFPSQYIGLFNGSSDGDAGNHLVGVELDTDQNNEFRDIDGNHIGVDINSLTSINSTSAGYYDDNDGGNSGDHGFHNLTLASHGEAMQVWVDYNGTAKQITVAMAPLKMAKPSKPLLSSTYDLSTVFVADEPYMVGFSSATGSFNSRHYVLGWSFAMDGPAPAIDIDKLPKLPRFAPKHKPKMVEIIPPLATATFIVALGTVSVLLIRRRMRYTELREDWEVEFGPHRFSYKDLFRATDGFKSMNLVGVGGFGRVYKGVLQSSKLEIAVKRVSHDSKQGMKEFIAEVVSIGRLQHRNLVQLLGYCRRKGELLLVYEYMANGSLDKHLYSEGDKRVLDWDQRLQIIKGIASGLLYLHEEWEKVIVHRDIKTSNVLLDSEMNSRLGDFGLARLYDRGADPLTTHVVGTIGYLAPELGRSSKATPLTDIFAFGIFILEVTCGRRPIMQVPEGEQHVLVDWVLEHWHKGSITEIVDTKLHGNYNVDEVCLVLKLGLLCSHPLSNARPNIRQVMKYLTGDMAMPELVPTHHSFHTLALMQNQGFDSYVMSYPSSTASMSAMSNNLSAQR

SEQ ID NO: 197 - DNA, 1749 bp, Oryza sativa
atggcgtcctccgcgccttccgcccccggcctcgcgccggtcgccaagccgccgccgccgccgtccaaggtgaaggtggcgacagcaaccgtgccaaccaatggcaagatcaagcagggtgcgaggccaatgcgtgtctcggcgccgccggtggagccgcggcggcggatgaacccgctccagcggctggcggcggcggcgattgacgccgtggaggaaggcctcgtcgccgggttgctcgagcgggggcacgcgctgccgcgcaccgctgatccggccgtgcagatcgccgggaactacgcgcccgtcggggagcgcccgccggtgagggggctgccggtgtccggccgcctcccggcgtgcctcgacggggtgtacgtccgcaacggcgccaacccgctccacgcgccgcgcgccgggcaccacctgttcgacggcgacgggatgctgcacgccgtgcggctcgccggggggcgcgccgagtcgtacgcgtgccggttcacggagacggcgcggctgcggcaggagcgggagatgggacgccccgtgttccccaaggccatcggcgagctccacggccactccggcgtcgcgcggcttctgctgttcggctcgcgcgcgctctgcggcgtgctcgacgcgtcccggggcatcggcgtcgccaacgccggcctcgtctaccacgacggccgcctcctcgccatgtccgaggacgacctcccctaccacgtccgtgtcacccacgacggcgacctcgagaccgtcgggaggtacgacttccatgggcagctcgacgccgacggcaccatgatcgcgcaccccaagctcgacccggtcaccggcgagctcttcgcgctcagctacaatgtcgtgtccaagccgtacctcaagtacttctacttcaccgccgacggccgcaagtcccgagacgtcgacatccccgtcggcgcgccgacgatgatccacgacttcgccgtcaccgagaactatgccgtcgtccccgaccagcagatcgtgttcaagctccaggagatggtgcgcggcggctcgccggtggtatacgacagggagaaggcgtcgcggttcggcgtgctcccgaagcgcgccgccgacgcgtcggagctccggtgggtggaggtccccggctgcttctgcttccacctctggaacgcgtgggaggacgacgccaccggcgagatcgtggtcatcggctcctgcatgacgccgccggacgccgtgttcaacgagccgtcgcagtcgccggaggaggagagcttccgcagcgtgctctccgagatccgcctcgacccgcgcaccggcgtgtcgcggcggcgcgacgtgctgcgcgacgccgccgagcaggtgaacctcgaggccggcatggtgaaccggcagctgctcggccggaagacgcggtacgcctacctcgccatcgccgagccatggccgagggtgtcgggcttcgccaaggtggacctcgagagcggcacggcggagaagttcatctacggcgaggggaggtacggcggcgagccatgcttcgttccgcgcgccggcgccgcggcggaggacgacggccacgtgctgtgcttcgtccacgacgaggagcgcggcacgtcggagctggtggtggtggacgccggcagcgaggcgatggaggaggtcgcggccgtgaagctgccggggcgcgtgccgtacggattgcacggcaccttcattggcgccaacgagctgcagcgacaagcttag

SEQ ID NO: 198 - protein, 582 aa, Oryza sativa
MASSAPSAPGLAPVAKPPPPPSKVKVATATVPTNGKIKQGARPMRVSAPPVEPRRRMNPLQRLAAAAIDAVEEGLVAGLLERGHALPRTADPAVQIAGNYAPVGERPPVRGLPVSGRLPACLDGVYVRNGANPLHAPRAGHHLFDGDGMLHAVRLAGGRAESYACRFTETARLRQEREMGRPVFPKAIGELHGHSGVARLLLFGSRALCGVLDASRGIGVANAGLVYHDGRLLAMSEDDLPYHVRVTHDGDLETVGRYDFHGQLDADGTMIAHPKLDPVTGELFALSYNVVSKPYLKYFYFTADGRKSRDVDIPVGAPTMIHDFAVTENYAVVPDQQIVFKLQEMVRGGSPVVYDREKASRFGVLPKRAADASELRWVEVPGCFCFHLWNAWEDDATGEIVVIGSCMTPPDAVFNEPSQSPEEESFRSVLSEIRLDPRTGVSRRRDVLRDAAEQVNLEAGMVNRQLLGRKTRYAYLAIAEPWPRVSGFAKVDLESGTAEKFIYGEGRYGGEPCFVPRAGAAAEDDGHVLCFVHDEERGTSELVVVDAGSEAMEEVAAVKLPGRVPYGLHGTFIGANELQRQA

SEQ ID NO: 199 - DNA, 660 bp, Oryza sativa
atggcgctcgcccaccagaccggcaagttcgaagtcggcgacaaggtcctcgccaccagtgctgtatttggggaggaaatctggccggcagcagggtacggacagaccatgtactgcatccgtcagagggttggccccctctacatgaagatggagaagagatttgggaaatgggatggtgctgctgagctcagtgagaaggagatcatcagggctgagaggaactccggggtgatcagcaacagggtgagggagatccagctgcaaaattaccagaggaagatggagcagaagatgcagagagaggaggatcttcgcatggggctgaggctgtacaaggatggtaaatatgaggaggcattggagaagttcgagtcagttttgggatcaaaacctgagatcaatgagtcttccatagctagctacaatgttgcctgctgttactcgaagcttgaccggatacaagctggtatttctgcactggaagatgccctgaaagcaggttatgaagacttcaagagaattcgcaccgacccggatctagaaaacttgaggaaaactgaggaattcaacgtcctgctgaacaagtacgacgaatcgttcatcaatgagaatgctatcaacgccatcaaatccttgtttggattcaacaagaaatga

SEQ ID NO: 200 - protein, 219 aa, Oryza sativa
MALAHQTGKFEVGDKVLATSAVFGEEIWPAAGYGQTMYCIRQRVGPLYMKMEKRFGKWDGAAELSEKEIIRAERNSGVISNRVREIQLQNYQRKMEQKMQREEDLRMGLRLYKDGKYEEALEKFESVLGSKPEINESSIASYNVACCYSKLDRIQAGISALEDALKAGYEDFKRIRTDPDLENLRKTEEFNVLLNKYDESFINENAINAIKSLFGFNKK

SEQ ID NO: 201 - DNA, 1311 bp, Oryza sativa
atggagcacgtgttcgccgtcgacgagatccccgacccgctgtgggctccgccgccgccggtgcagccggcggcggccgccggagtagatgacgtcggcgcggtgagcggcggcgggttgctggagcggtgcccgtcggggtggaacctcgagaggtttctggaggagctcgacggcgtccctgcaccggcggcgagcccggacggcgcggcgatttaccctagcccgatgccggcggcggcggcggaggcggcggcgcgctggagtaggggctacggcgatcgtgaggcggtgggggtgatgcccatgcccgcggccgcgcttccggcggcgccggcgagcgcggcgatggaccccgtggagtacaacgcgatgctgaagcggaagctggacgaggacctcgccaccgtcgccatgtggagggcctctggtgcaatacattctgagagtcctctaggcaataaaacatcactgagtatagttggttccatcctgagttcacagaagtgcattgaaggtaacgggatactagtgcagaccaagttaagtcctggcccaaatggaggatcaggcccatatgtaaatcaaaatacagatgctcatgccaagcaagctacgagtggttcctcaagggagccatcaccatcagaggatgatgatatggaaggagatgcagaggcaatgggaaatatgatccttgatgaagaagataaagtgaagaaaaggaaggaatccaaccgggagtcagctagacgctcaagaagcagaaaggcagctcgcctaaaagacctggaggagcaggtatcactattaagggttgaaaactcttctctgttgaggcgtcttgctgatgcaaatcagaagtacagtgctgctgctattgacaatagggtactaatggcagacattgaagccctaagagcaaaggtgaggatggcagaggagagtgtgaagatggttacaggggctagacaacttcaccaggccattcctgacatgcaatctcccctcaatgtcaactctgatgcttctgtgccgatccagaacaacaacccaatgaactacttctccaacgctaacaatgccggtgttaacagcttcatgcaccaggtttctccagcgttccagattgtggattctgtcgagaagattgacccaacagatccagtgcagctgcagcagcaacagatggcgagcttgcagcatcttcagaatagagcttgtggtggcggcgcaagttcgaatgaatatacagcatggggatcgtctctgatggatgcaaatgagcttgtcaacatggagcttcagtag

SEQ ID NO: 202 - protein, 436 aa, Oryza sativa
MEHVFAVDEIPDPLWAPPPPVQPAAAAGVDDVGAVSGGGLLERCPSGWNLERFLEELDGVPAPAASPDGAAIYPSPMPAAAAEAAARWSRGYGDREAVGVMPMPAAALPAAPASAAMDPVEYNAMLKRKLDEDLATVAMWRASGAIHSESPLGNKTSLSIVGSILSSQKCIEGNGILVQTKLSPGPNGGSGPYVNQNTDAHAKQATSGSSREPSPSEDDDMEGDAEAMGNMILDEEDKVKKRKESNRESARRSRSRKAARLKDLEEQVSLLRVENSSLLRRLADANQKYSAAAIDNRVLMADIEALRAKVRMAEESVKMVTGARQLHQAIPDMQSPLNVNSDASVPIQNNNPMNYFSNANNAGVNSFMHQVSPAFQIVDSVEKIDPTDPVQLQQQQMASLQHLQNRACGGGASSNEYTAWGSSLMDANELVNMELQ

SEQ ID NO: 203 - DNA, 2142 bp, Oryza sativa
atggcgctccaggcatcgtcgtcgccgtccatgttccgcgcgatcccgacgaacaccaacgcttcttgccggcgaaagttgcaggtcagggcgagcgcggcggcggcggcggcgaacggcggcggggatgggaaggtgatgatgaggaaggaggcggcgtcgggcgcgtggaagatcgactactccggcgagaagccggcgacgcctctgcttgacacggtgaactacccggtccacatgaagaacctctcgacgccggagctggagcagctggcggcggagctccgggcggagatcgtgcacacggtgtccaagaccgggggccacctgagctccagcctgggcgtcgtcgagctcgccgtggcgctgcaccacgtgttcgacacgccggaggacaagatcatctgggacgtcgggcaccaggcgtacccgcacaagatcctgacggggcggcgttcgcggatgcacaccatccggcagacctccgggctcgccgggttcccgaagcgcgacgagagcgcgcacgacgcgttcggcgcgggccacagctcgacgagcatctcggcggcgctcgggatggcggtggcgagggacctcctcgggaagaagaaccacgtcatctcggtgatcggcgacggcgccatgaccgccggccaggcgtacgaggcgatgaacaactcgggctacctcgactccaacatgatcgtggtgctcaacgacaacaagcaggtgtccctcccgacggcgacgctcgacggccccgccacgcccgtcggcgcgctgagcaaggcgctgacgaagctccagtcgagcaccaagctccgccgcctccgcgaggcggcgaagacggtgacgaagcagatcggcgggcaggcgcacgaggtggcggcgaaggtggacgagtacgcgcgcggcatggtgagcgcgtcgggctcgacgctgttcgaggagctcgggctctactacatcggccccgtcgacggccacagcgtcgacgacctcgtcgccatcttcaacaaggtgaagtcgatgccggcgccggggccggtgctcgtccacatcgtgacggagaaggggaagggctacccgccggcggaggccgccgccgaccggatgcacggcgtggtcaagttcgacccgacgacggggaggcagttcaagtccaagtgttcgacgttgtcctacacccagtacttcgccgaggcgctgatccgggaggccgaggccgacgacaaggtggtcggcatccacgccgccatgggcggcggcacggggctcaactacttccacaagaggttcccggagcggtgcttcgacgtggggatcgcggagcagcacgccgtgacgttcgccgcggggctcgccgccgaggggctcaagccgttctgcgccatctactcgtcgttcctgcagcgagggtacgaccaggtggtgcacgacgtcgacctgcagcggctgccggtgaggttcgccatggacagggcggggctcgtcggcgccgacgggcccacgcactgcggcgcgttcgacgtcgcctacatggcgtgcctgccgaacatggtcgtcatggcgcccgccgacgaggccgagctcatgcacatggtcgccaccgccgcagccatcgacgaccgccctagctgcttccgcttcccccgcggcaatggcattggcgccgtcctccctcccaaccacaagggcacacctctcgaggtcgggaaggggagggtgctcgtaggagggaacagggtggcgctgctagggtacggcacgatggtgcaggcatgcatgaaggcggcagaggcgctgaaggagcacggcatctacgtcaccgtcgccgacgcgcgtttctgcaagccgctcgacacagggcttatccgggagctcgctgccgagcacgaggtcctcgtcactgtggaggagggctccatcggagggttcggttctcacgtcgcccactacctcagcctcagcggcctcctcgatggccccctcaagttgaggtccatgttcttgccagacaggtacatagaccatggtgcaccagtagaccagcttgaggaggcaggattgacaccaaggcacattgctgccactgtgctgtccttgcttgggaggccattggaggcacttcagctcagctga

SEQ ID NO: 204 - protein, 713 aa, Oryza sativa
MALQASSSPSMFRAIPTNTNASCRRKLQVRASAAAAAANGGGDGKVMMRKEAASGAWKIDYSGEKPATPLLDTVNYPVHMKNLSTPELEQLAAELRAEIVHTVSKTGGHLSSSLGVVELAVALHHVFDTPEDKIIWDVGHQAYPHKILTGRRSRMHTIRQTSGLAGFPKRDESAHDAFGAGHSSTSISAALGMAVARDLLGKKNHVISVIGDGAMTAGQAYEAMNNSGYLDSNMIVVLNDNKQVSLPTATLDGPATPVGALSKALTKLQSSTKLRRLREAAKTVTKQIGGQAHEVAAKVDEYARGMVSASGSTLFEELGLYYIGPVDGHSVDDLVAIFNKVKSMPAPGPVLVHIVTEKGKGYPPAEAAADRMHGVVKFDPTTGRQFKSKCSTLSYTQYFAEALIREAEADDKVVGIHAAMGGGTGLNYFHKRFPERCFDVGIAEQHAVTFAAGLAAEGLKPFCAIYSSFLQRGYDQVVHDVDLQRLPVRFAMDRAGLVGADGPTHCGAFDVAYMACLPNMVVMAPADEAELMHMVATAAAIDDRPSCFRFPRGNGIGAVLPPNHKGTPLEVGKGRVLVGGNRVALLGYGTMVQACMKAAEALKEHGIYVTVADARFCKPLDTGLIRELAAEHEVLVTVEEGSIGGFGSHVAHYLSLSGLLDGPLKLRSMFLPDRYIDHGAPVDQLEEAGLTPRHIAATVLSLLGRPLEALQLS

SEQ ID NO: 205 - DNA, 1458 bp, Oryza sativa
atgaccatgaaggttaccactgcaactgcacatttcctcttggtgttcttggcgtccaccatctcccattcagtcatctgctcagctctcggaaacgaaaccgatcagctgtcttcgctgcttgaattcaagaacgcgatcagtctcgatccagagcaatccctcatctcatggaacagcagcaaccacctgtgcagctgggagggcgtctcgtgcagctccaagaacccaccacgcgtcaccgccattgatctagtaggtctagtaggtcgcatctctccttcgctcgggaacctaacattcctcaggaacctctccctggcgacgaacagattcaccggccagattccggcgtccctcggccgcctccgccgcctccggtcactctacctcagcaataacacgctgcaagggaccataccgagcttcgcgaactgctccgagctcagggcgctgttcctcgacggcaatgagctcgccggaggactccccggcgccggcgacctgcccgtcggcatcgaggcgctggtgctctcgtcgaaccgtctcgccgggacgatccctccctcgctcggcaacgtcacgacgctgaggaagcttgcctgcatgaacaacggcgtcggcggcggcatccccggcgagctcgccgcgctgcgcgggatggaggtgctggccgtcgacggaaaccggctgtcgggtgggtttccggtggcagtcatgaacatgtcggggctcgccgtgctcggcctcagcaccaacggcttcaccggcgagctgccgtccggcatcggcggcttcctgcccaagctccggcagctcaccatcggcggcaacttcttccaagggaatatcccttcttccttagcaaatgcttcgaatcttttcaagcttggtatgtctgacaataacttcaccggtgtggtgcctgcctccattggcaagcttgccaagcttacattattgaaccttgagatgaatcagctccatgctcgtagcaagcaagaatgggagttcatggataacctagctaattgcaccgagctacaagtactctctcttgagaagaatcaaatggaaggacaggtaccaagttcactaggcaatttttcagttcaacttcagtatctttacctggggctcaatagattgtcagggagttttccttctggcattgcaaaccttccaaacctgataattctggcactggatgacaactggtttacaggttctgtaccacaatggcttggaggtctcaaaacattgcagagcctaacagtgtcctacaacaattttacagggtatgtcccctcctccctttccaatctatcacatttgatggagctttttctagagtcaaatcagttcattgggaacatacctccaagccttggaaaccttcagttccttacaacaatcgacatttccaataacaatcttcatggtagtgtgccagagtaa

SEQ ID NO: 206 - protein, 485 aa, Oryza sativa
MTMKVTTATAHFLLVFLASTISHSVICSALGNETDQLSSLLEFKNAISLDPEQSLISWNSSNHLCSWEGVSCSSKNPPRVTAIDLVGLVGRISPSLGNLTFLRNLSLATNRFTGQIPASLGRLRRLRSLYLSNNTLQGTIPSFANCSELRALFLDGNELAGGLPGAGDLPVGIEALVLSSNRLAGTIPPSLGNVTTLRKLACMNNGVGGGIPGELAALRGMEVLAVDGNRLSGGFPVAVMNMSGLAVLGLSTNGFTGELPSGIGGFLPKLRQLTIGGNFFQGNIPSSLANASNLFKLGMSDNNFTGVVPASIGKLAKLTLLNLEMNQLHARSKQEWEFMDNLANCTELQVLSLEKNQMEGQVPSSLGNFSVQLQYLYLGLNRLSGSFPSGIANLPNLIILALDDNWFTGSVPQWLGGLKTLQSLTVSYNNFTGYVPSSLSNLSHLMELFLESNQFIGNIPPSLGNLQFLTTIDISNNNLHGSVPE

SEQ ID NO: 207 - DNA, 798 bp, Oryza sativa
cttgtgcaactacttggctattgtcgacgcagtggtgaacttctcctggtgtacgattacatgtccaatggaagcctcgacaggtatttgcatgatgaagaggggcaatgcagtttggattgggttaaaaggatccacatcatcaaaggtgttgcatcaggcttactttaccttcatgaggagtgggaaaaagtggtcatccaccgagatattaaggcgagcaatgtccttcttgacagtgaaatgaatggacgttttggagactttggcctcgcaagactatacgaccacggatctgatccaaaaactacccacgtggtcggtacaataggttatatagctccagagctcggccggtctggtaaggcaacacctcttactgatatatttgcctttggtatattcattctagaagtcatttgtggccaaagacccatcaagcaaagcagagaaggtcatcaaatcctacttgttgactgggttattcaccattggaaaaatggaacgctcatcgaaacggtggacaaaagactcgagggaaaccatgacactgatgaagcaatcctagtgctgaagctaggactgttgtgtgcacatccatttagcaatgcaaggccaagcatgcgtcaaatcgtacaatacctcgacggtgacatggcattacctgagcagatgccaacagaccaaatctccaatcagacggagggcttagaccagtatattcaaacagggcctcaatcaacaattccagtcaatgcaagctatggcacaatgtctaacctttcaggtggaagataa

SEQ ID NO: 208 - protein, 265 aa, Oryza sativa
LVQLLGYCRRSGELLLVYDYMSNGSLDRYLHDEEGQCSLDWVKRIHIIKGVASGLLYLHEEWEKVVIHRDIKASNVLLDSEMNGRFGDFGLARLYDHGSDPKTTHVVGTIGYIAPELGRSGKATPLTDIFAFGIFILEVICGQRPIKQSREGHQILLVDWVIHHWKNGTLIETVDKRLEGNHDTDEAILVLKLGLLCAHPFSNARPSMRQIVQYLDGDMALPEQMPTDQISNQTEGLDQYIQTGPQSTIPVNASYGTMSNLSGGR

SEQ ID NO: 209 - DNA, 720 bp, Oryza sativa
atggcagagcatttcagccacgccggcatgtacatcggctacacggcagacgccgccgcgtcctcctcctcctcctcctcgtcttcgtcgtcttcctcctcggagatgcttcggttcgacacgggctggcccgacgagacacctgcgccatcctccgtggcggggaggaggaggagcgcgggcggtgatcatcgtcaaggtcggggacagacggaggcggcggcggcgttcatcggggtgcggaggcggccgtggggcaggttcgcggcggagatccgggactcgacgcggaacggcgcgcgggtgtggatcggcacgttcgacagcgccgaggccgccgcgatggcctacgaccaggccgcgctctcggcgcgtggcgccgccgcggcgctcaacttccccgtggagcgcgtccgcgagtcgctccacgcgctctccctcggcgcggccgggggctcccccgtgctggcgctgaagcggcggcactcgaagcgaaagcggcgcaagaaagctgaactactcgccgccgccgccgccaccgccgcgacggcgaatgccacgccgcagacgcggaggatcagcaagagcacggaattgactactgcgacgacggacgagcagaagcggttcgtcgtggagcttgaggacctcggcgccgagtacctggaggagcttctctggctgtcggagatcaatggtggtagtgaccctgctgactga

SEQ ID NO: 210 - protein, 239 aa, Oryza sativa
MAEHFSHAGMYIGYTADAAASSSSSSSSSSSSSSEMLRFDTGWPDETPAPSSVAGRRRSAGGDHRQGRGQTEAAAAFIGVRRRPWGRFAAEIRDSTRNGARVWIGTFDSAEAAAMAYDQAALSARGAAAALNFPVERVRESLHALSLGAAGGSPVLALKRRHSKRKRRKKAELLAAAAATAATANATPQTRRISKSTELTTATTDEQKRFVVELEDLGAEYLEELLWLSEINGGSDPAD

SEQ ID NO: 211 - DNA, 750 bp, Oryza sativa
atggagggcgacgccgccggagccggtggcggcgaccggtcgagcatcgtgatcggcctcatcgagaaccgagccaaggaggttggtgttgctgcttttgatttgagatcagcctcactgcatctttctcagtatattgagaccagttgctcatatcacaatacgaagacacttctgcatttctatgatcctatggttgcaatagtgcccccaaacaaaacagcagcagacggtatggttggagtttcagagctggttggtaaacatttgccaacaaataaaaagataacaatggcacgtggctgctttgatgacacaaagggtgctgttatggtaaaaaatctttcagctagagacccatctgcactcggtttagatacttattgcaagcaatactatctttgtcttgctgctgcctctgcaacaattaagtggattgaatcagaaagaggtgtaattatcactaatcactcattatcagttacattcaatgggtcatttgaccacatgaacattgactcaactagtgtacaaacattggaaattattgaccctcttcatactgaactgtggggaactagcaacaaaaagaaaagtctctttcagatgttgaagactacaaagactacaggagggactagactactgagagccaacttgttgcaaccgttaaaagacattcaaacaatcaatactcgtctggattgcttggtaaggagattaatcttttttgttattctcaattcttaa

SEQ ID NO: 212 - protein, 249 aa, Oryza sativa
MEGDAAGAGGGDRSSIVIGLIENRAKEVGVAAFDLRSASLHLSQYIETSCSYHNTKTLLHFYDPMVAIVPPNKTAADGMVGVSELVGKHLPTNKKITMARGCFDDTKGAVMVKNLSARDPSALGLDTYCKQYYLCLAAASATIKWIESERGVIITNHSLSVTFNGSFDHMNIDSTSVQTLEIIDPLHTELWGTSNKKKSLFQMLKTTKTTGGTRLLRANLLQPLKDIQTINTRLDCLVRRLIFFVILNS

SEQ ID NO: 213 - DNA, 1443 bp, Oryza sativa
atgggcgcggcggcggcgcacgtcctcgtgttcccgatgccgctgcagggccacatcaacgtcatgctccacctcgccaccgccctcgccgccgccgccggcgtccacgtcaccttcctccacaccgaccacaacctccaccgccttggcaacgccgccgccgcaaccacggcgggctcgccacggcgcctccgcttcctgtccgtcccggacggcctccccgacgaccatccccgctccgcgagcgacgtcccggtgatggtcgattccctcctgggcgctggccaagccgcgtaccgtgctctgctcggctcgttgttggtcgggagcggcggcgccggcggcttcccgccggtgacctccgtcgtggcggacgcacttttaacgttcgcaatcgacgtcgccgaggagctcggcgtgcccgcgctggccttccgcacggcgagcgcgtctagcttactggcgtacatgtccgtgcccaggctcttcgagctcggtgagctgccgttcccacccggcggcgacctcgacgagccggtgcgtggcgttcccggcatggagggattccttcgccggcgagatctcccgagcaccttccgccgccacggcaacgaccacgacgtccatcccaagctgcaaatgctggtcgacctcaccacggggagctgcaaggcacgggcggtcatactcaacacggccgcgtcgctggaggcgccagcgctggcgcacatcgcgccgcgcgtgcgcgacgtcttcgccgtcggtccactccacgccatgtcccccgcgccggcggcggccaccagcctgtggcgcgaggacgacggctgcatggcgtggctcgacggccaggcggaccggtccgtcgtgtacgtcagcctggggagcctcaccgtcatctcgccggagcagttcacggagttcctgtccgggctcgtcgccgccggccacccgttcctctgggtgctccggccggacatggtcacggcgaggctgcagcacgccgatctgcaagaagccgtcgcggcggcggcggggcacagcaaggcgcgcgtcgtgcggtgggcgccgcagcgggacgtgctgcggcaccgcgccgtggggtgcttcctgacgcacgccgggtggaactcgacgctggaggccgccgtcgagggcgtgccgacggtgtgctggccgttcttcgtcgaccagcagatcaacagcaggttcgtgggcggcgtgtgggggacggggctggacatgaaggacgcgtgcgacgccgccgtcgtggcgaggatggtgagggaggcgatggagtccggcgagatcagggcgacggcccaagcgctggcggagaaggtgagacgggacgtcgccgacggcggctcgtcggcgacggagttcaagaggctcgtcggcttccttcaggagctcgccacgcgtatccaacacgctaattga

SEQ ID NO: 214 - protein, 480 aa, Oryza sativa
MGAAAAHVLVFPMPLQGHINVMLHLATALAAAAGVHVTFLHTDHNLHRLGNAAAATTAGSPRRLRFLSVPDGLPDDHPRSASDVPVMVDSLLGAGQAAYRALLGSLLVGSGGAGGFPPVTSVVADALLTFAIDVAEELGVPALAFRTASASSLLAYMSVPRLFELGELPFPPGGDLDEPVRGVPGMEGFLRRRDLPSTFRRHGNDHDVHPKLQMLVDLTTGSCKARAVILNTAASLEAPALAHIAPRVRDVFAVGPLHAMSPAPAAATSLWREDDGCMAWLDGQADRSVVYVSLGSLTVISPEQFTEFLSGLVAAGHPFLWVLRPDMVTARLQHADLQEAVAAAAGHSKARVVRWAPQRDVLRHRAVGCFLTHAGWNSTLEAAVEGVPTVCWPFFVDQQINSRFVGGVWGTGLDMKDACDAAVVARMVREAMESGEIRATAQALAEKVRRDVADGGSSATEFKRLVGFLQELATRIQHAN

SEQ ID NO: 215 - DNA, 1107 bp, Oryza sativa
atggggcgggcgccgtgctgcgagaagagcgggctgaagaaggggccgtggacgcccgaggaggacgagaagctcatcgcctacatcaaggagcacggccagggcaactggcgcacgctccccaagaatgccgggctctcgaggtgcgggaagagctgccggctgcggtggacgaactaccttaggccggacatcaagcgtggtcgcttctccttcgaggaggaggaggccatcatccagctccacagcatcctcggcaacaagtggtcagcgatcgcggcgcggctgccgggccggacggacaacgagatcaagaactactggaacacgcacatccgcaagcgcctcctccgcatgggcatagaccccgtgacccacgcgccgcgtctcgacctcctcgatctcacctccctcctcaagcccgccgccgccgccgcgtactaccccacgcaggccgacctcgacacgctccgcgcgctcgagccgctcgccggctacccggacctgctccgcctcgcctccgccatcctccccgccgccacgacgaccggcgcagccgccgccgccgccgccgagcaggcgcagcttctcctgccgtggctgcttcaggcgcagatggcgcagcagcaacagcaggtgacgccgccgccgccgccgccgccgcaggccgcggcgaccgaacagttcttgcaggccaccagcaccgcctgccaccaaatgccaggcctggttcacgccagcccgacgcagcagctggcgcagcaaccgcaggatcacatggcggcggcgacctgccaccgccgcggcgccgtgcagcacccgagctacgacaaccagctcgactacgtgccggcgctgatgcagatggcgtccgacgcgtccaacctgcagcagtggagcagcacggtctcgagtagcaacaaccacaacgtcaactccggcgtgtccacgccgtcgtcgagcccagcagccgccggacagatcaactcatcctctacgacgacgacgacgacgtatggcttgaacgcgagcggtgacgtcgacgacgctgggctgctcatcaacatgcacctatccgagctcctcgacgtgagcgactacatgtaa

SEQ ID NO: 216 - protein, 368 aa, Oryza sativa
MGRAPCCEKSGLKKGPWTPEEDEKLIAYIKEHGQGNWRTLPKNAGLSRCGKSCRLRWTNYLRPDIKRGRFSFEEEEAIIQLHSILGNKWSAIAARLPGRTDNEIKNYWNTHIRKRLLRMGIDPVTHAPRLDLLDLTSLLKPAAAAAYYPTQADLDTLRALEPLAGYPDLLRLASAILPAATTTGAAAAAAAEQAQLLLPWLLQAQMAQQQQQVTPPPPPPPQAAATEQFLQATSTACHQMPGLVHASPTQQLAQQPQDHMAAATCHRRGAVQHPSYDNQLDYVPALMQMASDASNLQQWSSTVSSSNNHNVNSGVSTPSSSPAAAGQINSSSTTTTTTYGLNASGDVDDAGLLINMHLSELLDVSDYM

SEQ ID NO: 217 - DNA, 903 bp, Oryza sativa
atgttcagagctgcgcagctcctcctcagggagacgaacagagctcttggggcagcaacttcgcctgcaggcttcgtcagtggcttctccacggcttccaactctgcgcagaggttggctggcaaggtggctgtcataaccggtggagctagcggcatcggcaaagcgacagccaaggagttcatcgagaatggcgccaaggtcatcatggccgatgtccaggatgacctcggccactccaccgcagcggagctcggcccggacgcctcgtacacgcgctgcgacgtcaccgacgaggcacaggtcgcggcggccgtcgacctcgccgtgaagcggcacggccacctcgacatcctctacaacaacgccggtgtcatgggcgccatgccgcaggacgacatggcgtccgtcgacctcgccaacttcgaccgcatgatggcgatcaacgcccgggcggcgcttgtcggcatcaagcacgccgcgcgcgtcatgtcgccccgccgcagcggcgtcatcctctgcacggccagcgacacgggcgtcatgcccatgcccaacatcgccttgtacgccgtctccaaggcaaccaccatcgccatcgtgcgcgccgcggcggagccgctgtcgcgccacggcctgcgggtgaacgccatctcgccgcacggcaccaggacgccgatggcgatgcacgtgttatctcagatgtaccccggcgtaagcaaagatgatttggagaagatggcggacgccgccatggacgccggagaggtgatggaacctaagtacgtcgctagggcggcgctgtatttggcttcggacgaggctaagtatgtcaacgggcacaacctcgtcgttgacggcggcttcacgtcgcacaaaggatccgacacacgtttgaattag

SEQ ID NO: 218 - protein, 300 aa, Oryza sativa
MFRAAQLLLRETNRALGAATSPAGFVSGFSTASNSAQRLAGKVAVITGGASGIGKATAKEFIENGAKVIMADVQDDLGHSTAAELGPDASYTRCDVTDEAQVAAAVDLAVKRHGHLDILYNNAGVMGAMPQDDMASVDLANFDRMMAINARAALVGIKHAARVMSPRRSGVILCTASDTGVMPMPNIALYAVSKATTIAIVRAAAEPLSRHGLRVNAISPHGTRTPMAMHVLSQMYPGVSKDDLEKMADAAMDAGEVMEPKYVARAALYLASDEAKYVNGHNLVVDGGFTSHKGSDTRLN

SEQ ID NO: 219 - DNA, 651 bp, Oryza sativa
atgtgtggcggcgcgatcatttccgacttcatcccgcagcgggaagcccaccgcgcggccaccggcagcaagcgtgccctctgcgcctccgacttctggccgtcggcgtcgcaggaagccgccgacttcgaccacctcaccgccccctgcaccttcacccccgaccaagcggcagaggagccgaccaagaagcgggagcggaagacgctgtaccgtggcatcaggcggcggccgtgggggaagtgggcggcggagatccgcgacccggcgaagggcgcgcgcgtctggctcggcaccttcgccaccgccgaggcggcggcccgcgcctacgaccgcgccgcccgccgcatccgcggggccaaggccaaggtcaacttccccaacgaggacccgccactcgacgacccggccgccgacggccacagccacggcggcgccgccatcccgtgcagggagttcatggactacgacgccgtcatggcgggcttcttccaccagccctacgtcgtcgccgacggcgtgccggccgtgccggcggaggaggcgcccacggtggcgtacgtgcaccaccacctgccgccgcagccgcagcaggacgcggggctggagctctggagctttgataacatccacacggccgtgccgatgtga

SEQ ID NO: 220 - protein, 216 aa, Oryza sativa
MCGGAIISDFIPQREAHRAATGSKRALCASDFWPSASQEAADFDHLTAPCTFTPDQAAEEPTKKRERKTLYRGIRRRPWGKWAAEIRDPAKGARVWLGTFATAEAAARAYDRAARRIRGAKAKVNFPNEDPPLDDPAADGHSHGGAAIPCREFMDYDAVMAGFFHQPYVVADGVPAVPAEEAPTVAYVHHHLPPQPQQDAGLELWSFDNIHTAVPM

SEQ ID NO: 221 - DNA, 876 bp, Oryza sativa
ttaattgcagcgaaggcggtgtacggggagagtgagtggtatttcttcagcccgcgagaccgcaagtaccccaacggaatccggccgaaccgcgccgccgggtcggggtactggaaggcgacgggaaccgacaagcccatccacgacagcgccaccggcgagagcgtcggcgtcaagaaggccctcgtcttctaccgcggccgccctcccaagggcaccaagaccagctggatcatgcacgagtaccgcctcgccgccgaccctctcgccgccgccgcaaacacctacaagccctcctcctcctcccgattccgcaacgtctccatgaggctggacgactgggtgctctgccggatctacaagaagtccggccaggcgtcgccgatgatgccgccgctcgccgccgactacgaccacgacgagccgtccggagtccttgacgacgcctacagcttctacgcgccgccgatgatcagcaccacgctcatccccaagctccccaagatcccctccatctccgagctcttcgacgagcacgcgctcgcccagatcttcgacgccgccgccgacccgccggccgaccaccatcagcatgccctcgccgtccacccctccctgaaccagctcctcggcgtcggcgacaacttcctcgcggagtgctacccgtcgacggcgtccacggccaccgttgccggcggcaagcgcaaggcgagcccggccggagactacgccggcggcggccacacgccggcgaagaggctcaacggctcatgcttcgacgtggcgccgcagtccgtggtgggcggcttgcaagcgacgccgtcgtcagtcctcgccggactcaaccaccagatgcttcctcctcagctattctga

SEQ ID NO: 222 - protein, 291 aa, Oryza sativa
LIAAKAVYGESEWYFFSPRDRKYPNGIRPNRAAGSGYWKATGTDKPIHDSATGESVGVKKALVFYRGRPPKGTKTSWIMHEYRLAADPLAAAANTYKPSSSSRFRNVSMRLDDWVLCRIYKKSGQASPMMPPLAADYDHDEPSGVLDDAYSFYAPPMISTTLIPKLPKIPSISELFDEHALAQIFDAAADPPADHHQHALAVHPSLNQLLGVGDNFLAECYPSTASTATVAGGKRKASPAGDYAGGGHTPAKRLNGSCFDVAPQSVVGGLQATPSSVLAGLNHQMLPPQLF

SEQ ID NO: 223 - DNA, 906 bp, Oryza sativa
atgtcggagtcggaggtgtcggtgatcaaccagctggaggaggaggagactcggctggagctgccgccggggttccggttccaccccaccgacgaggaggtggtgacccactacctcacccgcaaggcccaggaccggagcttctcctgcgtcgtcatcgccgacgtgaacctcaacaactgcgagccatgggacctcccaagcaaggcgaagatgggggagaaggagtggttcttcttctgccacaaggaccgcaagtacccgacggggatgaggacgaaccgggcgacggccagcgggtactggaaggccaccgggaaggacaaggagatcttccgcggccgcggcctcctcgtcggcatgaagaagacgctcgtcttctacatgggccgcgccccccgcggcgagaagaccccctgggtcatgcacgaataccgcctcgacggcaagcttccccccaacctcccccgctccgcaaaggaggaatgggcggtttgccgggtgttcaacaaagacttggcggcaaagattgcccaaatgccgccgcctcccttcccgcgcaacgactccttcgacctcgacctcgacgacttcctccacctcgacgccgacctgccgccgctcatcgacgaccccttcgcctccacctccacgctcaagacggagccacctccgccggccaacctgatgcacaaccactacggctacttctccctcccggcgtcagcgaccaattataaccacagctccggcgccatggcggaccaggcgattcggaggttctgcaaggcggaggcgtcgacggcgtgcttctccggcgccgacgctgacgtggatccggtggtggacgagctgctctccttcccggactccatcacggactactcctacatatggaaggcctga

SEQ ID NO: 224 - protein, 301 aa, Oryza sativa
MSESEVSVINQLEEEETRLELPPGFRFHPTDEEVVTHYLTRKAQDRSFSCVVIADVNLNNCEPWDLPSKAKMGEKEWFFFCHKDRKYPTGMRTNRATASGYWKATGKDKEIFRGRGLLVGMKKTLVFYMGRAPRGEKTPWVMHEYRLDGKLPPNLPRSAKEEWAVCRVFNKDLAAKIAQMPPPPFPRNDSFDLDLDDFLHLDADLPPLIDDPFASTSTLKTEPPPPANLMHNHYGYFSLPASATNYNHSSGAMADQAIRRFCKAEASTACFSGADADVDPVVDELLSFPDSITDYSYIWKA

SEQ ID NO: 225 - DNA, 1032 bp, Oryza sativa
atgacggtggaagtggaggcggtgaccatggcgaaggaggagcagccggaggaggaggaggtgatcgagaagttggttgagaagatcaccgggctggcggcggccatcggcaagctgccgtcgctgagcccgtcgccggaggtgaacgcgctgttcacggagctggtgatgacctgcatcccgcccagcagcgtggacgtggagcagctgggggcggaggcgcaggacatgcgcggccgcctcatccgcctctgcgccgacgccgagggccacctcgaggcgcactactccgacgtcctcgccgcccacgacaacccgctcgaccacctcgccctcttcccctacttcaacaactacatccagctcgcccagctcgagtacgccctcctcgcccgccacctccccgccgccccgccgccctcccgcctcgccttcctcggctccggcccgctcccgctcagctccctcgtcctcgccgcccgccacctccccgccgcctccttccacaactacgacatctgcgccgacgccaaccgccgcgccagccgcctcgtccgcgccgaccgcgacctgtccgcgcgcatggccttccacacctccgacgtcgcccacgtcaccaccgacctcgccgcctacgacgtcgtgttcctggcggcgctggtgggtatggccgccgaggagaaggcgcgcatggtggagcacctcgggaagcacatggcgcccggcgccgccctggtggtgcggagcgcgcacggcgcccggggattcctgtaccccgtggtggacccggaggagatccgccgcggcggcttcgacgtgctcgccgtgcaccacccggagggcgaggtgatcaactccgtcatcatcgcgcgcaagccgcccgtggcggcgccggcgttggagggaggagacgcgcacgcgcacggccatggcgccgtggtgagccgtccatgccagcgctgcgagatggaggcgagggcgcaccagaagatggaggacatgtccgccatggagaagctgccctcctcgtag

SEQ ID NO: 226 - protein, 343 aa, Oryza sativa
MTVEVEAVTMAKEEQPEEEEVIEKLVEKITGLAAAIGKLPSLSPSPEVNALFTELVMTCIPPSSVDVEQLGAEAQDMRGRLIRLCADAEGHLEAHYSDVLAAHDNPLDHLALFPYFNNYIQLAQLEYALLARHLPAAPPPSRLAFLGSGPLPLSSLVLAARHLPAASFHNYDICADANRRASRLVRADRDLSARMAFHTSDVAHVTTDLAAYDVVFLAALVGMAAEEKARMVEHLGKHMAPGAALVVRSAHGARGFLYPVVDPEEIRRGGFDVLAVHHPEGEVINSVIIARKPPVAAPALEGGDAHAHGHGAVVSRPCQRCEMEARAHQKMEDMSAMEKLPSS

SEQ ID NO: 227 - DNA, 795 bp, Oryza sativa
gtagcaagaaggagaagaagaagaagatcatcaatgagcatctcggtgaacgggcagtcgtgcgtgccgccggggttccggttccacccgacggaggaggagctgctcaactactacctccgcaagaaggtcgcctccgagcagatcgacctcgacgtcatccgcgacgtcgacctcaacaagctcgagccatgggacatccaagagaggtgtaagattgggtcagggccgcagaacgactggtacttcttcagccacaaggacaagaagtacccgacggggacgaggacgaacagggcgacggcggccgggttctggaaggccaccggccgcgacaaggccatctacaacgccgtccaccgcattggcatgcgcaagacgctcgtcttctacaagggccgcgccccccacggccagaagtccgactggatcatgcacgagtaccgcctcgacgaccccgccaccgacaccgccgccgccacacccacggttacttctgctgctgctgcggcggcggcgatggcggcggcggcggacggcgggcaggaggatggctgggtggtgtgcagggtgttcaagaagaagcaccaccacaaggaggccggcggcggcggcggcaagcacggcggcgacggcagcgccggcgccaaggcggcgcacgcttactcctccagcgacgacgcgctcgaccagatcctgcagtacatgggcaggtcgtgcaagcaggagcacgagctccccccgccgccgaccacctgctgctccaccaccaccaccgcacggactgggccatga

SEQ ID NO: 228 - protein, 264 aa, Oryza sativa
VARRRRRRRSSMSISVNGQSCVPPGFRFHPTEEELLNYYLRKKVASEQIDLDVIRDVDLNKLEPWDIQERCKIGSGPQNDWYFFSHKDKKYPTGTRTNRATAAGFWKATGRDKAIYNAVHRIGMRKTLVFYKGRAPHGQKSDWIMHEYRLDDPATDTAAATPTVTSAAAAAAAMAAAADGGQEDGWVVCRVFKKKHHHKEAGGGGGKHGGDGSAGAKAAHAYSSSDDALDQILQYMGRSCKQEHELPPPPTTCCSTTTTARTGP

SEQ ID NO: 229 - DNA, 618 bp, Oryza sativa
atggggtggggcatgccgacgcggccaccggcgacgtcgacgccgtcgcgggtgcaggcgctgtacgagctctgcaagcgcaccttcccatcgccgtcctccgtcgccgcgtcctcctcaccgtcgtccccgccgcccgaccacgccatccgcgccatctcctctctgatggatacaataactcctgttgatgttggactcagagatgataatctcgaggatggaagagggtttgggttctttgaatcaaacttcctgaagaattcagcgagggttgctagatgggcgcaacccatcacttatctgcatgtctacgagtgtgacgccttctctattggaatattctgcttaccaacgtcggcggtcattcctctccatgatcatccgggaatgactgtattgagcaaattactctatggttcgatgcatgtcaaatcgtatgattgggtagagcctgctgttctagcaagtggcaagccagtgaaacttggaaagttacatacggatgatgttctgaatgccccttgtccaactgctgttttcagtggcggagacagcgtgggggcgccaattttaatcccaagagggtctgaaatagactttgttctgagattttag

SEQ ID NO: 230 - protein, 205 aa, Oryza sativa
MGWGMPTRPPATSTPSRVQALYELCKRTFPSPSSVAASSSPSSPPPDHAIRAISSLMDTITPVDVGLRDDNLEDGRGFGFFESNFLKNSARVARWAQPITYLHVYECDAFSIGIFCLPTSAVIPLHDHPGMTVLSKLLYGSMHVKSYDWVEPAVLASGKPVKLGKLHTDDVLNAPCPTAVFSGGDSVGAPILIPRGSEIDFVLRF

SEQ ID NO: 231 - DNA, 3075 bp, Oryza sativa
atgggtggtgttagtggtaagctggtgtgggtgttgctcgtgatgtgctcctcatggctgatcgccgctgttcatgcccagcaagcggcaacaactgatccaatcgaagtggcggcgctggaggcgatcctggggagatggggcaagacgacgtcgccgctgtggaggatgagcggcgagccatgccgcggcgtccccgtcgacggcagcaccgacctcgacggcaaccccaagaacaaccccggcatcaagtgcgactgttcctacaacagcggcaccgtctgccatattacccagctgagggtatacgcattgaacgttgtcggtcagatacctgcagaattgcagaacctcacctacctaacttacttgaacctggatcaaaattacttgtcaggccccataccatcattcattgggcaattgactgccttgacagaattgcacgtgggattcaatccactctcaggatcacttccaaaggaacttggaaatctcacgaacctcaatttgctaggcattagtttgaccaatttttctggtcaacttcctgaagaattgggcaacttgaccaaacttcgacaattgtatactgatagtgctgggttgagtggcccattcccttctacgctctcaaggcttaagaacctaaaactcctgcgggcatcagataacaattttactggaacaatacctgattttattgggagcttgtctaatttggaagatctggctttccaaggtaattcttttgaaggaccgatcccagcaagtttgtctaatctaaccaaattgacaaccttgcggattggtgatattgtaaatgggagctcttcattggcctttatcagcagtctgacatctctggataccctcgtactgaggaactgcaagatatctggagaccttggagcagtagatttttcgaagttcgcaaacttaactttcctggacttgagttttaacaatatctcagggaatgttcctaaatcaattctgaatctacaaaagcttatattcctgtttcttggcaacaacagcctaacaggagaattgccagatgggataagcccttcgctaacgaacttagatttctcatacaaccagctcactggtagctttccctcctgggttacccagaacaatctgcaattgaatttggtggcaaacaactttattcttggcagcaccaacattggcatgctacctccagggctaaactgcctccaggaagatactccatgttttcgtggttctccaaaatattattcctttgcggtagactgtggtagtaatagatctatcagagtttcggataatactatgtacgaattggattccacaaaccttggggactcatcatattatgttacaagtcaaacaagatggggcgttagtaatgtaggaaaattattccaggccccaaatgacagtaagataatacatagtggtgagaagatccagaatgcagtggattcagaactattccaaactgcaaggatgtcgccgtcgtctctgagatactatggccttggacttgagaatggaaattacaccgttctgcttaaatttgcagagttaggttttccagacacgccaacttggcaaagcttaggaaggagattttttgacatatatatccagggtgaactaaaagaaaaggacttcaatataagaaagatggctggtggaaaatctttcactgctgtttacaagagttacacaacaactgtgtcaaaaaactttcttgaaatccatctattctgggctggaaagggcacttgttgtattcctattcaaggttactacggaccattgatctcagcattaagcatcactccaaattttagtcctactgtgcgaaacggtgtacccaaaaagaaaagtaaagcaggtgcaattgttgggattgtgattgctgcctcggttttaggatcagctatcttattcggaatatttatggtcataaagaagagaagaagaatggcaaaacagcaagaagaattatacaacctagttggacagcctgatgtcttcagtaatgctgaactcaagttagctacagacaatttcagttctcaaaacattcttggggaaggtggatatggtccagtctataagggtgtgctacctgatggaagagttatagctgtaaaacaactttcccaatcatcccatcagggcaaaagtcagtttgtgacagaggttgcaactatttctgctgtgcaacatcggaatcttgtaaaattgcatggttgctgcattgatagtaacacacctttattagtttatgagtatcttaagaatggaagcttggataaagcattatttggaaacggtagcataaaactggactgggcaacacgcttcgagatcattttaggaattgcaagaggcctaacttatcttcatgaggagtcgagcgtgcgcattgttcatagggacatcaaagctagcaatgtcctacttgacacagacctcaccccaaagatctctgactttggactcgccaagctttatgatgagaagaagactcatgttagtacaggaattgcgggcacatttggttatctggctcctgagtatgcgatgagacgacatttgactgaaaaggttgatgttttcgcattcggggtggtagcactagagattgttgctggtcggtcgaacaccgacaattctcttgaggaaagtaagatctatctctttgagtgggcttggagcttgtatgaaaaggagcaagcactcgggattgttgacccaagacttgaggaattcagcagggatgaagtgtatagagtcatccatgtcgcactcatctgcacacagggctcaccctatcagcgaccaccaatgtcaaaggttgtggcaatgctaactggagatgttgaggtggcagaggtagtgacgaagccgaactacatcaccgagtggcagttcaggggtgggaataccagctatgttaccagccactcaggatcaactacccctaagctcagcaggcagaaagagattgatcctctcactcaatcaccaacaatcaccggagttagccatgagcatgagggaaggtga

SEQ ID NO: 232 - protein, 1024 aa, Oryza sativa
MGGVSGKLVWVLLVMCSSWLIAAVHAQQAATTDPIEVAALEAILGRWGKTTSPLWRMSGEPCRGVPVDGSTDLDGNPKNNPGIKCDCSYNSGTVCHITQLRVYALNVVGQIPAELQNLTYLTYLNLDQNYLSGPIPSFIGQLTALTELHVGFNPLSGSLPKELGNLTNLNLLGISLTNFSGQLPEELGNLTKLRQLYTDSAGLSGPFPSTLSRLKNLKLLRASDNNFTGTIPDFIGSLSNLEDLAFQGNSFEGPIPASLSNLTKLTTLRIGDIVNGSSSLAFISSLTSLDTLVLRNCKISGDLGAVDFSKFANLTFLDLSFNNISGNVPKSILNLQKLIFLFLGNNSLTGELPDGISPSLTNLDFSYNQLTGSFPSWVTQNNLQLNLVANNFILGSTNIGMLPPGLNCLQEDTPCFRGSPKYYSFAVDCGSNRSIRVSDNTMYELDSTNLGDSSYYVTSQTRWGVSNVGKLFQAPNDSKIIHSGEKIQNAVDSELFQTARMSPSSLRYYGLGLENGNYTVLLKFAELGFPDTPTWQSLGRRFFDIYIQGELKEKDFNIRKMAGGKSFTAVYKSYTTTVSKNFLEIHLFWAGKGTCCIPIQGYYGPLISALSITPNFSPTVRNGVPKKKSKAGAIVGIVIAASVLGSAILFGIFMVIKKRRRMAKQQEELYNLVGQPDVFSNAELKLATDNFSSQNILGEGGYGPVYKGVLPDGRVIAVKQLSQSSHQGKSQFVTEVATISAVQHRNLVKLHGCCIDSNTPLLVYEYLKNGSLDKALFGNGSIKLDWATRFEIILGIARGLTYLHEESSVRIVHRDIKASNVLLDTDLTPKISDFGLAKLYDEKKTHVSTGIAGTFGYLAPEYAMRRHLTEKVDVFAFGVVALEIVAGRSNTDNSLEESKIYLFEWAWSLYEKEQALGIVDPRLEEFSRDEVYRVIHVALICTQGSPYQRPPMSKVVAMLTGDVEVAEVVTKPNYITEWQFRGGNTSYVTSHSGSTTPKLSRQKEIDPLTQSPTITGVSHEHEGR

SEQ ID NO: 233 - DNA, 348 bp, Oryza sativa
atggggcaccgcggcatcatcatcgtcgtcggcggcggtgtgccgtggaggaggtacgcggcgctgccgttcttgaggacggggaacggcagaggagatcggaacaggaggaatcgttggcgagcttcttggcgaggccgaggagccgcgggcgacgacgacaagagcatgggggaggagcagcggcagcagccctcgtcggcgatgccggcggcaccgaatctggaggaggagacggggatcttgaggttctcaccagagatggccgcggtgggcgacgacgacaagagcttggggaggagcggcggcaacggccctcatcggcggtgcccgcggcgtcggatctag

SEQ ID NO: 234 - protein, 115 aa, Oryza sativa
MGHRGIIIVVGGGVPWRRYAALPFLRTGNGRGDRNRRNRWRASWRGRGAAGDDDKSMGEEQRQQPSSAMPAAPNLEEETGILRFSPEMAAVGDDDKSLGRSGGNGPHRRCPRRRI

SEQ ID NO: 235 - DNA, 660 bp, Oryza sativa
ttcaaactcacaccgagacgagagctcagcagccagcagcgagagaacacaaactcacatgaccaaccggatctccgccatgggaggcaaccaggagtacatgatccgattcgacggccacatcgacgatgcctcgccgagctccgccactgcagagccaccgccgccgcggcggcggctggcgccgcggcggggcagaggaggaggaggaagaagaagaacaagtaccgcggcgtgcggcagcggccatgggggaagtgggctgcggagatccgcgaccctcgccgagcggtgcgcaagtggctggggacgttcgacaccgccgaggaggccgccagggcgtacgaccgcgccgccgtcgagttccgcggcccgcgcgccaagctcaacttcccgttccccgagcagctctccgcgcacgacgacagcaatggcgacgccagcgccgccgccaagtccgacacattgtctccgtcgccgcgcagcgcagacgccgacgagcaagtagagcacacgcggtggccgcagggaggaggaggcggcggcggcggcggcggcggcgagacaggggaccagctctgggaaggcttgcaagacctgatgcagctggacgaaggcgggctcagctggttcccacagtcgtcagattcttggaattga

SEQ ID NO: 236 - protein, 219 aa, Oryza sativa
FKLTPRRELSSQQRENTNSHDQPDLRHGRQPGVHDPIRRPHRRCLAELRHCRATAAAAAAGAAAGQRRRRKKKNKYRGVRQRPWGKWAAEIRDPRRAVRKWLGTFDTAEEAARAYDRAAVEFRGPRAKLNFPFPEQLSAHDDSNGDASAAAKSDTLSPSPRSADADEQVEHTRWPQGGGGGGGGGGGETGDQLWEGLQDLMQLDEGGLSWFPQSSDSWN

SEQ ID NO: 237 - DNA, 1854 bp, Oryza sativa
atggtcagggtggtagtgggcagcaggagagtgcatgttcagttgctgattctgcagctgctggccgcgatggtggctgcggcggaagaacccgcggtgccaaccgcgaagaaaatcaagagctgcaccaccagctgcggtaacatcagcatcgagtacccgttcggggtggagcccggctgctaccacacagtcggcttcaacctcacctgcgaccactcataccacccgcccaggctgttcctcggtgatggcacggtgcaggtgctcgacatctccatccccaatggaaccgtgcgcatcaacagcggccgaatcaatctggagtacgatggccgtggaagcgcaaacgggacatggggcggtggcctcccagatggcgggccgttcttcctgtcggagtcggggagtagcctagtgttgatgggccacgatagccaggtcgacgtctgggggctgggaggggacaacccgatcgcctcctgcagtgtcatctgcccaaggatcccatcagcaattttcgggataagtgcgtgctcgggcatttgttgttgtcaaacaaacatcattttaggctactcatcctatctcatccagattcacggtgatgcaaactttttaaatatctacatggtggaccagggattcaactataccaatttcattaattccaatgtcgatctcattatttttgattccgacagagatccgcaagcgctcccagccttgctggaatgggtaatcagtaattcgacaagttattgtcctagaaattcatctgcccccgagtgtcgcagtgcccatagctcttgccaagacactgatgcttgggcaaacaacgggtatcggtgcaagtactcttatggttatcaaggcaatccatacatcattgatggatgcaaagggctaagcatagctctaatagtttctggtggatcaattgttcttattctggtacttgctactcccctagtagcacgtgtggtcaagcaacgcagggagaaaaaactgaaagaaaagttctttaagcaaaatcatggattgctactgcagcagttaatatcaagaaacacagattttggtgagcgaatgataattaccttagaggagctccaaaaggccacaaacaattttgatagatcttgccaagtcggagatggagggcatggagtcgtgttcaaggggattctagacctgaatgttgtggccataaaaaaatcaaagattatagttcaaagagaaatagcttcttcaatgccaatttatcatagagatattaagtcctccaatatacttcttgatgatagtttaacagcgaaggtatcagattttggggcttcaaagtacaccccgatagatcgatctgaaataactacaactgttcaaggaacaattggctacttagatcccatgtactattatattggtcgactaactgacaagagcgatgtttttagttttggagttcttcttgtggagttgcttactcgaaagaaacctgttgttgacacgttcgatggtgatggccttgtttcacattttattttgctgctctcagaaggaaaccttattaacataatagatcctcaagtcaaggaggaggaagatggagaagtccatgaagtagctgcactgtgtactaaattgaaaggaggagaacggccttcaatgagagaagtagagatggcactggaaaacatattatcaaaaaagggccccttccataagggaaatagggaatcaagtagacccagtaaaaatcaaatttcagcactatacatgtcaattgaaggagttgccacagaagcaagtagtcaatccatggaagaggaaatgctatcgtttcctcgataa

SEQ ID NO: 238 - protein, 617 aa, Oryza sativa
MVRVVVGSRRVHVQLLILQLLAAMVAAAEEPAVPTAKKIKSCTTSCGNISIEYPFGVEPGCYHTVGFNLTCDHSYHPPRLFLGDGTVQVLDISIPNGTVRINSGRINLEYDGRGSANGTWGGGLPDGGPFFLSESGSSLVLMGHDSQVDVWGLGGDNPIASCSVICPRIPSAIFGISACSGICCCQTNIILGYSSYLIQIHGDANFLNIYMVDQGFNYTNFINSNVDLIIFDSDRDPQALPALLEWVISNSTSYCPRNSSAPECRSAHSSCQDTDAWANNGYRCKYSYGYQGNPYIIDGCKGLSIALIVSGGSIVLILVLATPLVARVVKQRREKKLKEKFFKQNHGLLLQQLISRNTDFGERMIITLEELQKATNNFDRSCQVGDGGHGVVFKGILDLNVVAIKKSKIIVQREIASSMPIYHRDIKSSNILLDDSLTAKVSDFGASKYTPIDRSEITTTVQGTIGYLDPMYYYIGRLTDKSDVFSFGVLLVELLTRKKPVVDTFDGDGLVSHFILLLSEGNLINIIDPQVKEEEDGEVHEVAALCTKLKGGERPSMREVEMALENILSKKGPFHKGNRESSRPSKNQISALYMSIEGVATEASSQSMEEEMLSFPR

SEQ ID NO: 239 - DNA, 546 bp, Oryza sativa
tcgctccccacctcccaatccgccgccgatgtcgccgacaacctctggaacgctttcctcgccggccgccgcgccggcgtgtcgcgtccgtttggccacgaggccgccgttgacggcgttgacttcttcatcgaccagggcggcgccgatcactacgacgaactcgctcgccgcctccacggctacggcgccggcgtgatctggacggcgacgacgaggtgctcgtacccggatcatcggctggagaaggcgctggcgacgaaggtgtttgatcggattcatgtgaggatgtacggcgccggcgagatcgagcggcggtgcgtgatatcgtcgaggtattcgtgggagaaatgggcggcggcgtatccgggaagcaaggtgtatatagggttggtggcgtcgccggagcaggacgaggcgtgggtttttcagaaggatctttattatgaatatctgcagtttgttaccaagctgcctaactatggtggtttggctgtctatgataggtactatgataagaaggctaattacactggtgagggttaa

SEQ ID NO: 240 - protein, 181 aa, Oryza sativa
SLPTSQSAADVADNLWNAFLAGRRAGVSRPFGHEAAVDGVDFFIDQGGADHYDELARRLHGYGAGVIWTATTRCSYPDHRLEKALATKVFDRIHVRMYGAGEIERRCVISSRYSWEKWAAAYPGSKVYIGLVASPEQDEAWVFQKDLYYEYLQFVTKLPNYGGLAVYDRYYDKKANYTGEG

SEQ ID NO: 241 - DNA, 948 bp, Oryza sativa
atggcgtccgaacaacaacgccggcgatcaccacctaccatcctcgccgccatccttcttctctccttcttggcgacggccaacctcgccggcgccatcgatccagccggaaggagacggaacgtggtcgtcttctggggaggcaacaagaacgaaggcagcctccgttcagtctgcgacagtggactctacaacatcgtcatcatctccttctacagcctcttcggccatggccgctactgggacgacctctccggccacgacctccgccacatcggcgccgacatcacccactgccatttcaaggccgtctacgtcctcctctccatcggcggcggcgatggaaaagactactccctaccttcctccaaatccgccgccgacgtcgccgacaacctctacaactccttcctcggcggcagccgcccgggagtctaccacccattcggcgatgacgtcacagtcgtcggcattgacttcttcattgaccgcggtcaacccgaccactactacgagatcgccgagcggatcaactacgacacccgccactggcgtgaccccatcgggttcaagctgacggcgacggtgagttgtgcgtacgacgactctgaccccaggatgaagaaggcgctggaaacctaccttttccggcgaatccacgtcaggttctacgatgatccgaggtgttcatacaaccatgccgggctcgccggcgtcatggcgcagtggaacaggtggtcggcgagttacccttataatgggaagatttacttggggctcgcggcggcgaatttgacggggaagaatgacatggtcgccgtcggtgagctctaccggaagctgctgccggcggtgcagaagacggatacctacggaggagtgatgctttggaacagctactatgactccatcactcactacggacggtatgtcagtgcctgggcttaa

SEQ ID NO: 242 - protein, 315 aa, Oryza sativa
MASEQQRRRSPPTILAAILLLSFLATANLAGAIDPAGRRRNVVVFWGGNKNEGSLRSVCDSGLYNIVIISFYSLFGHGRYWDDLSGHDLRHIGADITHCHFKAVYVLLSIGGGDGKDYSLPSSKSAADVADNLYNSFLGGSRPGVYHPFGDDVTVVGIDFFIDRGQPDHYYEIAERINYDTRHWRDPIGFKLTATVSCAYDDSDPRMKKALETYLFRRIHVRFYDDPRCSYNHAGLAGVMAQWNRWSASYPYNGKIYLGLAAANLTGKNDMVAVGELYRKLLPAVQKTDTYGGVMLWNSYYDSITHYGRYVSAWA

SEQ ID NO: 243 - DNA, 852 bp, Oryza sativa
atggcgctgatccgacgccggctcctcccaattctgtcccttctcctcgccgtcaccttcctcgccggcgttgcgacggcgaagaagaccggccaactcaccgtcttctggggacgcaacaagaacgagggcacccttcgcgagacctgcgacacgggactctacaacatcgtcatcatctccttctacagcgtgttcggccatggccgctactggggcgacctctccggccacgacctccgcccaatcggcgccgacaacaagcactgccaatccaaacacatctccgtcttcctctccatcggcggcgccggcaatgattactccctcccatcctcccaatccgccgccgacgtcgccgacaacatctggaacgcgcacatggacggccgccgccccggcgtgttccgcccattcggcgacgccgccctcgccgtcaagctctacgcatacaacaaattgtaccgtgctcggacgccggtgaggctgacggcgacggtcaggtgtatgttcccggacatgaggatgacgaaggcattggacacgaagcttttcgagcgaatccatgtcaggttctacgacgacgccaagtgctcctacaaccatgggggcctcgccggcgtgatggcgcagtggagcaaatggacggcgaggtacccgaacagcgaggtttatcttggtctcgcggcggtgaacttgccggggaagaatgacaatgtgtttgtcaagcagctctactactatctgcttcccaatgtgcagaaggcgaagaattatggtgggattatgctttgggacaggttctttgacaagcagactggttacggcaaaaccgtcaagtactgggcttaa

SEQ ID NO: 244 - protein, 283 aa, Oryza sativa
MALIRRRLLPILSLLLAVTFLAGVATAKKTGQLTVFWGRNKNEGTLRETCDTGLYNIVIISFYSVFGHGRYWGDLSGHDLRPIGADNKHCQSKHISVFLSIGGAGNDYSLPSSQSAADVADNIWNAHMDGRRPGVFRPFGDAALAVKLYAYNKLYRARTPVRLTATVRCMFPDMRMTKALDTKLFERIHVRFYDDAKCSYNHGGLAGVMAQWSKWTARYPNSEVYLGLAAVNLPGKNDNVFVKQLYYYLLPNVQKAKNYGGIMLWDRFFDKQTGYGKTVKYWA

SEQ ID NO: 245 - DNA, 984 bp, Oryza sativa
atggacgcggcgtggcgcggcggcgttggctgctcgccggtctgcctcgacctctgcgtcgggctgtcgccggtgcgggagccgtcggcggcgaggcacgagctgcttgaccggccggccggctgccgcggcggtggggattccaagtcgatgaccaatgacgaggcgaagatcgtcgaggcgaaggtcactcagatgagcgaggagaatcggcggctgaccgaggtgatcgcccgcctgtacggcggccaaatcccgcggctcggcctcgacggctcggcctcgccgccgcggccggtgtcgccgttatcgggcaagaagaggagcagggagagcatggagacggcgaattcctgcgacgccaacagcaacaggcatcagggcggcgacgccgaccacgccgagagcttcgccgccgacgatggcacctgccggaggatcaaggtcagccgggtgtgcaggcggatcgacccgtcggacacctccctggtggtcaaggacgggtaccaatggcggaagtacgggcagaaggtgacgcgcgacaacccgtcgccgagggcctacttccggtgcgccttcgcgccatcgtgcccggtgaagaagaaggtgcagcggagcgcggaggacagctcgctgctggtggcgacgtacgagggcgagcacaaccacccgcacccgtctccgcgcgccggcgagctcccggcggcggcggggggggccggtggctcgctgccgtgctccatctccatcaactcctccggcccgaccatcacgctcgacctcaccaagaacgggggagccgtgcaggtggtcgaggcggcgcatccgccgccgccgccggacctcaaggaggtgtgccgggaggtcgcgtcgccggagttccggaccgcgctggtggagcagatggccagcgcgctcaccagcgaccccaagttcaccggcgcgctcgccgcggcgatcctccagaagctgcccgaattctag

SEQ ID NO: 246 - protein, 327 aa, Oryza sativa
MDAAWRGGVGCSPVCLDLCVGLSPVREPSAARHELLDRPAGCRGGGDSKSMTNDEAKIVEAKVTQMSEENRRLTEVIARLYGGQIPRLGLDGSASPPRPVSPLSGKKRSRESMETANSCDANSNRHQGGDADHAESFAADDGTCRRIKVSRVCRRIDPSDTSLVVKDGYQWRKYGQKVTRDNPSPRAYFRCAFAPSCPVKKKVQRSAEDSSLLVATYEGEHNHPHPSPRAGELPAAAGGAGGSLPCSISINSSGPTITLDLTKNGGAVQVVEAAHPPPPPDLKEVCREVASPEFRTALVEQMASALTSDPKFTGALAAAILQKLPEF

SEQ ID NO: 247 - DNA, 957 bp, Oryza sativa
atggacgacgacggcgacggctcatcgtcaccgaccgacgacagcgccgccgccgggcttttgccgctcttcagccgatcgccggccgaggatcttgaggagaagctgaggcgggcgatggaggagaacgcgcggctgacgcgagcgctcgacgccattctggccggtcaccacgcccaccagcgcgcgctcttggcgccgtcgctgtcgccgccgccgccttccgccacagcaagggcgccgagcgtgtccaccagctgcgcggcgagggaggacgccgcaccggcggtcgccgccgccgccgcgtcgacggcatgtccgtcgagacagcagccgccgaccgcggagccacggcccaaggtcaggacggtccgcgtgcgcgccgacgccgccgacgccaccgacgccaacagcatggcggagaccgtgaaggatgggtaccaatggaggaagtacgggcagaaggtgacgcgtgacaacccctaccctagagcttacttccgctgcgcattcgcgccgtcttgccccgtcaagaagaagctccaaagatgtgcggaggataggtcaatgctagtggcgacctacgagggagaacacaaccatgccctgtccacgcagacaaccgaattcgtcgccagcggctgcactacgagccagcacgccggggggtcgtcgtcgtcgccgctgccgtgctccatctccatcaactcgtcgggccgcacgatcacactcgacctgacgaaccaagcagggtccggatcgatcgcgagctgcggcgtcgaggcggccgccgtctccggcgagctcgtcacggtgctctcgccggagttgaggaggcacctcgtggaggaggtggtgcaagtgctcaagaacgacgccgagttcgtggaggccgtgaccaacgccgtggccgctagagttgtggatcaaatcccacacattcctgttcatttgtag

SEQ ID NO: 248 - protein, 318 aa, Oryza sativa
MDDDGDGSSSPTDDSAAAGLLPLFSRSPAEDLEEKLRRAMEENARLTRALDAILAGHHAHQRALLAPSLSPPPPSATARAPSVSTSCAAREDAAPAVAAAAASTACPSRQQPPTAEPRPKVRTVRVRADAADATDANSMAETVKDGYQWRKYGQKVTRDNPYPRAYFRCAFAPSCPVKKKLQRCAEDRSMLVATYEGEHNHALSTQTTEFVASGCTTSQHAGGSSSSPLPCSISINSSGRTITLDLTNQAGSGSIASCGVEAAAVSGELVTVLSPELRRHLVEEVVQVLKNDAEFVEAVTNAVAARVVDQIPHIPVHL

SEQ ID NO: 249 - DNA, 1971 bp, Oryza sativa
atggagttcttgtcgcagatgtggtcgctgctgggcctcctcaccatcctgcagaacgtgctcccgacgcagctactctccctcctccactcgctgtggcagtcgctgcaggactcgctcacgccgtactcctacttcgacgtgccggagttcctcggctccgccgccgtcgagcccaacgcgttgtaccgccatgtccagctctacctccaccgctcactcctcctctcctcgccgccgcctccccgcctcacgctgtcgctgccgcgctccgtcgccgtctccggcggcggaggtgggcatgacgcgggagcggcagcggcggcggcgacgccgtccgtgtcgctctccccgaaccactcggtggctgacagcttcgacgggcaccgcgccgtgtggacgcaccacgccgacacgctccaggactcgctcgaggagcggcggtcgttctcgctgcggctgcccaagcggcacgccgcggcggtgctcccggcgtacctggcgcacctcgccgccgcggcggaccacctggagcggtcgtcgcgcgcgcggaggctgcacacgaacgcggcatccccgcgcggcgccgcggcgtggtcgtcggtgccgttctgccacccgtccacgttcgacacgctcgcgctcgacccggagctcaaggcgcgcctcctcgccgacctcacggcattcgccgacggcagcgagttctaccgccggacggggcggccgtggaagcgcgggtacctcctccacggcccgcccggctctggcaagtcctcgctcatcgccgccatggcgaaccacctccggtacgacgtgttcgacctcgagctcacccgcgtcgccaccaacgccgacctccgcgcgctcctcatccagaccaccaaccgctcgctcatcgtcatcgaggacatcgactgctccctccacctcaccggcgaccgcaagagcagacggaacaaaagacgccggctcctccacgccaccgccgcctccgacgacgactcgtcggactccgactccgacggcggcgacaaccaccgctccaaggtgacgctgtccgggctgctcaacttcaccgacggcctgtggtcgtgctgcggcgaggagcgcatcatcgtgttcacgacgaaccacgtcgacggcatcgacccggcgctgctccgcccggggaggatggacgtgcacgtgcgcctgggcgcctgcggcgcgcacgccatgcgcgagctggtcggccgctacgtcggcgtcgaggaccacgagatgctggacgcggcggagtgctgcgtccgcggcggcgccgagatgacgccggccgaggtgggagaagtgctgctgcggagcagggacgacccggacgccgcggtgacggagctcgccgtggagctcaaggcgaggcagagcgcggcggccgacgagctccagtgggaggactcggcggcggagctctccgacgagtcgccgaggaagaaagggttagggtgggagggcaaggtcaggtctccgtcaaagtttgacctaatgttcaaatctcaagattgtgttctgttaggaatcgagtgggctgccaatgggcctgtacaaccattcattcaagctggcccaagcaaacccaagccgctgatccatgggatttcaagcatggaggcaatggggaagtaccgctgcggcgtcccgtgcagttggtcattggatttgggcaaggctactgctcatggcaccaacgcccacaacctgttcggtgaaatgtcaagccaaggagaggtgtcccaagaagatctcaagatatctaaggccgtccccatcaattcccccatgaacaaagaggagaaaatgatggatgaagctctggatcagatattggagaagcttgaacaaatgaagaccaagcgtaggtgcaatgagaagattgatcagattttggagaagttggacgagatagaagctaataggcgctatagttggccataa

SEQ ID NO: 250 - protein, 656 aa, Oryza sativa
MEFLSQMWSLLGLLTILQNVLPTQLLSLLHSLWQSLQDSLTPYSYFDVPEFLGSAAVEPNALYRHVQLYLHRSLLLSSPPPPRLTLSLPRSVAVSGGGGGHDAGAAAAAATPSVSLSPNHSVADSFDGHRAVWTHHADTLQDSLEERRSFSLRLPKRHAAAVLPAYLAHLAAAADHLERSSRARRLHTNAASPRGAAAWSSVPFCHPSTFDTLALDPELKARLLADLTAFADGSEFYRRTGRPWKRGYLLHGPPGSGKSSLIAAMANHLRYDVFDLELTRVATNADLRALLIQTTNRSLIVIEDIDCSLHLTGDRKSRRNKRRRLLHATAASDDDSSDSDSDGGDNHRSKVTLSGLLNFTDGLWSCCGEERIIVFTTNHVDGIDPALLRPGRMDVHVRLGACGAHAMRELVGRYVGVEDHEMLDAAECCVRGGAEMTPAEVGEVLLRSRDDPDAAVTELAVELKARQSAAADELQWEDSAAELSDESPRKKGLGWEGKVRSPSKFDLMFKSQDCVLLGIEWAANGPVQPFIQAGPSKPKPLIHGISSMEAMGKYRCGVPCSWSLDLGKATAHGTNAHNLFGEMSSQGEVSQEDLKISKAVPINSPMNKEEKMMDEALDQILEKLEQMKTKRRCNEKIDQILEKLDEIEANRRYSWP

SEQ ID NO: 251 - DNA, 2124 bp, Oryza sativa
atggatctcgaggcggggtcaatccgaccccgcagcgacggcgaaggcggcggtccggcggccggcagggagaccgatgatagcaatgtttggaaggatctattccttgcttacaagactcttggtgttgtttttggtggcctcgtcacttctcccctctacgtttatccctctatgaacttgtcatctcccacagaagctgactacctggggatatacagcataatgttttggactcttactttaattggtgtggtcaagtatgtatgcatagctctcaatgctgatgatcatggtgaaggtggtacatttgccatgtattctttgttgtgtaggcatgctgatataggcatccttccttccaaaagggtgtatgcagaagaagatccactgcttcacagtcagtctgcaatagccagaaggcctagtaggctgggaaagttctttgaacagagcataactgcaagaagagttttgttattcgtagcagtacttgggatgtgcatgctcattggagatggcatacttactcctgctatttcagtactatcagcaattgatgggataagagggccatttcctactgttagcaaacctgttgtggaggccctttctgcagcaattctcattggcttattcttattgcaaaagtatgggacttcaaaagtgagctttctgttttctccaatcatggcagcatggactttcaccactccaattatcggcttatacagtattgtacattactatcctggcatcttcaaagccatttcaccgtattatattgttcatttcttcctgagaaataaaaggcaaggttggcaactgcttggtgggactgttttatgcatcacaggtgctgaagctatgttcgcagatcttgggcacttcagcaaaaaggctattcagatagcatttctgtctagcatatatccttctttggtgctcacttatgctgggcaaacagcataccttataaacaatgtcaatgactttggtgatggtttctataaatttgttcctcgtcccgtttactggccaatgtttgtcgttgcaacactagcagcaattgttgcgagccaatccttaatatccgcgacattctctgtcatcaagcaatcagttgtcctggattacttccctcgtgttaaagtggtgcacacgtcgcaacacaaagaaggcgaggtttactccccagaaatcaattacattctcatggtactgtgtgtcggtgttatactaggatttggtggtggcaaggctatagggaatgctttcggtgttgtggtcatcatggtcatgctcataactacagtcctactcacccttgtgatgatcatcatatggagaacaccacttgtgcttgctgggctgtacttcgtccccttcttcatcatggaaggggcctatgtcagtgcagttttcaccaagatccctgaaggaggttggcttcctttcgcggtttccataacccttgcaatgatcatgttcggctggtactacggtcggcaaaggaaatttgagtacgagatgacaaacaaagtgagcttggagcacctcggcgagctcttggcaaggcctgaggttcagagggtccctggcctctgcttcttctacagcaacatacaggacgggctaactccaatcctcagccattacatcaagaacatgagctcactgcacacggtcacaatttttgtcaccctgaggtccctgctcgtcgccaaagttgatcaaagcaaaaggatcctgataaacaggcttggaccaaacggggtgtacggctgcaccgttcagtacggctacgccgacaacctcagcctcgagggcggcgacgacctcgccgcgcaggtcacgagctgcctgcaatggcacatccagatggacactgatggccgccggtcaccggaggaagagatggcgcagctggaggcggcgaggttggccggcgtggtgcacgtccggggcaagatgaggttctacgtcggcgaggacgccggctggtttgataagatcatgctcggattctatgagttcttgcatgggatctgccggtcggctctgccggttcttgggatgcctctgcaacagcgagttgagatcggcatgctgtacaaggtctga

SEQ ID NO: 252 - protein, 707 aa, Oryza sativa
MDLEAGSIRPRSDGEGGGPAAGRETDDSNVWKDLFLAYKTLGVVFGGLVTSPLYVYPSMNLSSPTEADYLGIYSIMFWTLTLIGVVKYVCIALNADDHGEGGTFAMYSLLCRHADIGILPSKRVYAEEDPLLHSQSAIARRPSRLGKFFEQSITARRVLLFVAVLGMCMLIGDGILTPAISVLSAIDGIRGPFPTVSKPVVEALSAAILIGLFLLQKYGTSKVSFLFSPIMAAWTFTTPIIGLYSIVHYYPGIFKAISPYYIVHFFLRNKRQGWQLLGGTVLCITGAEAMFADLGHFSKKAIQIAFLSSIYPSLVLTYAGQTAYLINNVNDFGDGFYKFVPRPVYWPMFVVATLAAIVASQSLISATFSVIKQSVVLDYFPRVKVVHTSQHKEGEVYSPEINYILMVLCVGVILGFGGGKAIGNAFGVVVIMVMLITTVLLTLVMIIIWRTPLVLAGLYFVPFFIMEGAYVSAVFTKIPEGGWLPFAVSITLAMIMFGWYYGRQRKFEYEMTNKVSLEHLGELLARPEVQRVPGLCFFYSNIQDGLTPILSHYIKNMSSLHTVTIFVTLRSLLVAKVDQSKRILINRLGPNGVYGCTVQYGYADNLSLEGGDDLAAQVTSCLQWHIQMDTDGRRSPEEEMAQLEAARLAGVVHVRGKMRFYVGEDAGWFDKIMLGFYEFLHGICRSALPVLGMPLQQRVEIGMLYKV

SEQ ID NO: 253 - DNA, 825 bp, Oryza sativa
atgaccaagaaggtgataccggccatggcggcggcgaggcaggattcttgcaagaccaagcttgatgagcgtgggggtagtcatcaggctccgagctccgcgcggtggatctcgtccgagcaggagcacagcatcatcgtcgcggctctgcggtacgtggtgtccgggtgcaccacgccgccgccggagatcgtcacggtggcgtgcggggaggcgtgtgctctgtgcggcatcgacggctgtctcgggtgcgacttctttggggccgaggcggcggggaacgaggaggcggtaatggcgacggattatgctgctgctgctgctgcggccgcggtggcaggaggatcaggcgggaagagggttaggcggaggaggaagaagaacgtgtaccgcggcgtgcggcatcggccgtgggggaagtgggcagcggagatacgcgacccgcgccgcgcggtgcgcaagtggctcgggacgttcgacaccgccgaggaggccgccagggcgtacgaccgcgccgccctcgagttccgcggcgcgcgcgcgaagctcaacttcccgtgctccgagcctttgcccatgcccagccaaagaaacggcaatggcggcgatgctgtcacggcggcgacgacaacggcagagcagatgactccgactctgtcgccgtgcagcgcggatgccgaggagacgacgacgccggtggattggcagatgggcgcggacgaagccggcagcaaccagctctgggatggcttgcaggacctgatgaagctggatgaagcggacacctggttcccgccattttccggtgcagcgtctagtttttga

SEQ ID NO: 254 - protein, 274 aa, Oryza sativa
MTKKVIPAMAAARQDSCKTKLDERGGSHQAPSSARWISSEQEHSIIVAALRYVVSGCTTPPPEIVTVACGEACALCGIDGCLGCDFFGAEAAGNEEAVMATDYAAAAAAAAVAGGSGGKRVRRRRKKNVYRGVRHRPWGKWAAEIRDPRRAVRKWLGTFDTAEEAARAYDRAALEFRGARAKLNFPCSEPLPMPSQRNGNGGDAVTAATTTAEQMTPTLSPCSADAEETTTPVDWQMGADEAGSNQLWDGLQDLMKLDEADTWFPPFSGAASSF

SEQ ID NO: 255 - DNA, 1059 bp, Oryza sativa
atggctatgggaatggaaggatcgggaggaggagggtcggcgaagaagaaagaggagagcttgccgccggggttcaggttccacccgacggacgaggagctcatcacctactacctgcggcagaagatcgccgacggcggcttcacggcgagggccatcgccgaggtcgatctcaacaagtgcgagccatgggatctcccagagaaggcaaaaatgggagagaaggaatggtacttctttagcctaagggatcgaaagtacccaactggcgtgcgcacaaaccgagcaactaatgctggttattggaaaacaacgggaaaggataaggaaatcttcactggacaaccaccagcaacaccggagttagttggaatgaagaaaaccctagtgttctacaaaggaagggctccaagaggtgagaaaaccaattgggtcatgcatgagtaccgactccactccaaatcaatccccaaatcaaacaaggatgagtgggtcgtctgtcgcatatttgccaagactgccggcgtcaagaaatacccctccaacaatgctcattcccgatcccaccacccatacacactagacatggtcccacctctcctcccagctctattgcaacaagacccatttggtcgtggacaccacccttacatgaaccccgttgacatggcggaactctcccggtttgctagaggtacgccggggttgcacccacacatccaaccacaccccggttacatcaacccggctgcgccttttacactatcaggccttaacctcaaccttggatcctcgccagccatgcctccaccaccaccaccgccaccacaatccatcctccaagcgatgtcgatgccgatgaaccaaccaagaagtactacaaaccaggttatggtaacagagcaaatgattccaggactagccaatggtgtcatcccacagggaacagatggaggttttaccacggatgttgttgttggaggcactggcatcagataccagaatttggatgtagagcagctggtggagaggtactggcctggtagttaccaaatgtag

SEQ ID NO: 256 - protein, 352 aa, Oryza sativa
MAMGMEGSGGGGSAKKKEESLPPGFRFHPTDEELITYYLRQKIADGGFTARAIAEVDLNKCEPWDLPEKAKMGEKEWYFFSLRDRKYPTGVRTNRATNAGYWKTTGKDKEIFTGQPPATPELVGMKKTLVFYKGRAPRGEKTNWVMHEYRLHSKSIPKSNKDEWVVCRIFAKTAGVKKYPSNNAHSRSHHPYTLDMVPPLLPALLQQDPFGRGHHPYMNPVDMAELSRFARGTPGLHPHIQPHPGYINPAAPFTLSGLNLNLGSSPAMPPPPPPPPQSILQAMSMPMNQPRSTTNQVMVTEQMIPGLANGVIPQGTDGGFTTDVVVGGTGIRYQNLDVEQLVERYWPGSYQM

SEQ ID NO: 257 - DNA, 1725 bp, Oryza sativa
atgaggacgtggcggctcgccgtgctggcgtgcctgtgcgccgccgcggcggcggcgccggcggaggcgaagacgcaccaccacacgtggaacatcacgtaccagtacaagtcgccggactgcttcaggaagctcgccgtgaccatcaacggcgagtcccccgggccgaccatccgcgccgcccagggcgacaccctcgtcgtcaccgtccacaacatgctcgacaccgagaacaccgccatccactggcacggcatccgccagattggcagcccgtgggctgacggcaccgccggcgtcacgcagtgccccatcctccccggcgagaccttcacctacagattcgtcgttgacaggcctggaacgtacatgtaccacgcgcactacggcatgcagcgcgtggcggggctggacggcatgctcgtcgtgtcggtgcccgacggcgtcgccgagcccttcgcctacgacggcgagcacaccgtcctcctcatggactggtggcaccagagcgtgtacgagcaagccgtcggcctcgcctccgtccccatggtgttcgtcggcgagccccagtcgcttctgatcaacggcagaggcgtgttcaactgctcgccgccggcggccagcaatggcggtggcgcggcgtgcaatgcgtttggcggcgagtgcgggtggccgacgctgttcaccgcctcgccggggaagacgtaccgcctccgcatcggcagcctgacgtcgctggcgtcgctgagcttcgagatcgaggggcacacgatgacggtggtggaggccgacgggtactacgtcacgccggtggtggtcaagaacctcttcatctactccggcgagacctactccgtgctcgtcaccgccgaccaggacccgtcccggagctactgggcggcgtcgcacgtcgtcagccgcgaccccaccaagacggcgccgggcagggccgtcgtcaggtacgcctccgccgccgtggatcacccgcgcacgccgccgccgaccgggccacggtggaacgacacggcgagcagggtggcgcagagcaggtcgttcgccgcgctgccggggcacgtcgagccgccgccggcgaggcccgaccgcgttctcctcctcctcaacacgcagagcaagatcgacaaccacaccaagtgggccatcaacggcgtctccctcagcttcccggcgacgccgtacctcgtcgccatgaagcacggcctccgcggcgagttcgaccagcggccgccgccggacagctacgaccacgggagcctcaacctctcctccccgccggcgagcctcgccgtgcgccacgccgcgtaccgcctcgccctgggctcggtggtcgacgtggtgctgcagaacacggcgatcccgccgccgaacgggcggagcgagacgcacccgtggcacctccacgggcacgacttctgggtgctcggctacggcgagggcaagttcgtgccggaggtggacgggccgggtctgaacgcggcgagcgcgaggggcggcgccgtgatgaagaacacggtggcgctgcacccgatggggtggacggcggtgaggttcagggcgagcaacccgggcgtgtggctgttccactgccacctggaggcccacgtgtacatgggcatgggcgtggtgttcgaggagggcgtcgacgtgctgccgcggctgccggcgtccatcatggggtgcggccgcaccaagggccatcactactaa

SEQ ID NO: 258 - protein, 574 aa, Oryza sativa
MRTWRLAVLACLCAAAAAAPAEAKTHHHTWNITYQYKSPDCFRKLAVTINGESPGPTIRAAQGDTLVVTVHNMLDTENTAIHWHGIRQIGSPWADGTAGVTQCPILPGETFTYRFVVDRPGTYMYHAHYGMQRVAGLDGMLVVSVPDGVAEPFAYDGEHTVLLMDWWHQSVYEQAVGLASVPMVFVGEPQSLLINGRGVFNCSPPAASNGGGAACNAFGGECGWPTLFTASPGKTYRLRIGSLTSLASLSFEIEGHTMTVVEADGYYVTPVVVKNLFIYSGETYSVLVTADQDPSRSYWAASHVVSRDPTKTAPGRAVVRYASAAVDHPRTPPPTGPRWNDTASRVAQSRSFAALPGHVEPPPARPDRVLLLLNTQSKIDNHTKWAINGVSLSFPATPYLVAMKHGLRGEFDQRPPPDSYDHGSLNLSSPPASLAVRHAAYRLALGSVVDVVLQNTAIPPPNGRSETHPWHLHGHDFWVLGYGEGKFVPEVDGPGLNAASARGGAVMKNTVALHPMGWTAVRFRASNPGVWLFHCHLEAHVYMGMGVVFEEGVDVLPRLPASIMGCGRTKGHHY

SEQ ID NO: 259 - DNA, 2829 bp, Oryza sativa
atggaggcaacggcggtgagcttggcgcggtcggtgctggacggcgtgctgaacagggcgggctccgccgtcgccgacgaggcggcgctgctgcttggcgtgcggcgggaggtggagttcatccgcgacgagctggacatgatgagatcattcctcaaggtggccacggcgaaccccgacgccgacgacaccgtgcggacgtgggtgaagcaggtgcgcgacctcgcctacgacgtcgaggactccctcctcgacttcgcgctcttcgccgacacgttgtcgtcgtcctcctcgtcgtcgtggtggctcccgtggcgcatcgccgagcgccaccgcgtcgcggcgaggatccgggagctgaaggcgagcgtcgaggagctcaaccagcgcttccttcggtaccgcatcgtcgtcgaacacccgcgcgcgtcgcgcggcggcggcgcctccgacgaccagcagcagcttcacgaccacgatgggcagtactactcggcggagctggcgttccaggagtcggacatcatcgggcgggcgagggagaaggcggaggtgacggcgctcgtcctctccggctgcggcggcggcgacgtcgtcggcggcggcgcgctgggggtggtgtcggtgtgggggatgggcgggatggggaagtcgtcgctggtgcggatggtgtacaacgacccggagctcctcgacgccttcgactgcgacgcgtgggtgacggtgccgcacccgctcgacagcgccgacgagttcgtgcggcggctgcggcgccacctcgccgtcggcaaggaccaggacgtgcacgcctacctccgggagaagcggtacgtgatcatcgtcgacgacctgcacagccgggaggagtgggagcacatctggccggtgctgcacgtcgacggcggcaagggcagccgcgtggtggtgacgacgcggcgggaggacgtcgcgcgccactgcgcggggctcgtgcgcgaggggcacggccatgtctacgagctcaggccgcttgggcgggaagagtcaaaggatctcttttgtcagaaggtctacaaatcaaccgagtacatattggagaaggaaatggaggatctagctggtcctatcttaaagagatgccgggggcttccactggccatatccactataggaggtctgttagccaatagacccaaaacaggcatagagtggataaagttggatgaacaccttggtgcagagctggagtcgtctgaccttcgtaacatcactaaagtgattgtttcaagttatgatggcttgccatattatttgaaatcaatattcttatacctcagtattttccccgagaatcatgagatcagatgcacccgcttgttgaggcgttggatggcagaagggttcatagcaaagaaccgtgatatgccggtggaggaagtggggcagcgtttctacaatgagctcatcaacagaagtatgatccaaccctccaagaagaggattagccccagcgtgagtgtggatcgctgtcgggttcacagcatggtgctacagatcatcctgtccaagtccattgaggagaaccaactcttcatcatcaagaaacactgcaatgaggttccacaaagtaagatacgccatctggtagtatccaggtggaaaaggagggatgagaggctagaaaatataaatttttcgtatgttcgatcactaacagtgtttggggattgccctgcttctctcatatctcctaaaatgcgtcttctgcgagttctggacctggaagattcacttaacctgaagaatgaagacctcaggcacgtaggagagcttcaccatctaaggtatctttgtttgagaggtacagagatatcaaagcttccatcttttcagaaccttcggtacctcgagacgctagacatccaagacacaaaggtgacacagctccctgatggaattgcaaaacttgagaagctacgctatcttcttgctggcgtcaacttctcaaaagagttgctgcacaaggtggaacagccggagacagataatcgcaaggccaaccagttgggcaacatgttatcatgcttatattgcaacagcagtgattattgcgggatttctagcttggatcgagttagtgtaagagctcctgagggagttgagaagctaagggatttgcacatgttgggtgtgatcaatgttggccatggcaatggagtggtagggaagattaagaagctgacaaacttgcgaaggttaggagtctcaggtgtccttaaggaagaagggcaggacttatgcaagtcaatagagaagctaagtcgtttgcagcggcttgagctgcgctctgattccctaaagtttcttgctgaaagtgaattcgcagcaccaaaacatcttctttcacttaggctatatggcaatctagtcaggttgcctaaatggattggttcactcaatgatctggcgaagctgaagctgctggggacacaattgaagcagggagaaatcatgcacctcgggaagctgcgcaacctagcatttctcggcttgtgggacaactcttatgtagggtattcactgcattttggtcctggcacattcccaaaactcaagttccttgacattgatgggctgaagaacattgaaacggtggcgatcgagaatggcgcgatgcctgagcttgaacaactctgggtgaacgactgcaaaggactacttgatagcaaagatggtttatcaggagtaccacatctgacaaacctgaatgagcttcttgtgaagaagtgtggtgagaaggagaacctgatggagatactgcaaacacagaatattttgtctggttggtga

SEQ ID NO: 260 - protein, 942 aa, Oryza sativa
MEATAVSLARSVLDGVLNRAGSAVADEAALLLGVRREVEFIRDELDMMRSFLKVATANPDADDTVRTWVKQVRDLAYDVEDSLLDFALFADTLSSSSSSSWWLPWRIAERHRVAARIRELKASVEELNQRFLRYRIVVEHPRASRGGGASDDQQQLHDHDGQYYSAELAFQESDIIGRAREKAEVTALVLSGCGGGDVVGGGALGVVSVWGMGGMGKSSLVRMVYNDPELLDAFDCDAWVTVPHPLDSADEFVRRLRRHLAVGKDQDVHAYLREKRYVIIVDDLHSREEWEHIWPVLHVDGGKGSRVVVTTRREDVARHCAGLVREGHGHVYELRPLGREESKDLFCQKVYKSTEYILEKEMEDLAGPILKRCRGLPLAISTIGGLLANRPKTGIEWIKLDEHLGAELESSDLRNITKVIVSSYDGLPYYLKSIFLYLSIFPENHEIRCTRLLRRWMAEGFIAKNRDMPVEEVGQRFYNELINRSMIQPSKKRISPSVSVDRCRVHSMVLQIILSKSIEENQLFIIKKHCNEVPQSKIRHLVVSRWKRRDERLENINFSYVRSLTVFGDCPASLISPKMRLLRVLDLEDSLNLKNEDLRHVGELHHLRYLCLRGTEISKLPSFQNLRYLETLDIQDTKVTQLPDGIAKLEKLRYLLAGVNFSKELLHKVEQPETDNRKANQLGNMLSCLYCNSSDYCGISSLDRVSVRAPEGVEKLRDLHMLGVINVGHGNGVVGKIKKLTNLRRLGVSGVLKEEGQDLCKSIEKLSRLQRLELRSDSLKFLAESEFAAPKHLLSLRLYGNLVRLPKWIGSLNDLAKLKLLGTQLKQGEIMHLGKLRNLAFLGLWDNSYVGYSLHFGPGTFPKLKFLDIDGLKNIETVAIENGAMPELEQLWVNDCKGLLDSKDGLSGVPHLTNLNELLVKKCGEKENLMEILQTQNILSGW

SEQ ID NO: 261 - DNA, 2310 bp, Oryza sativa
atggggaagaccacagcttcggcggtggctggggaagacatcggctccgacgggggcagcggtggaggctttcaacaatggggccaatactggcgatatgctgatgatgatgaagtggcaaatggggaagagggccaacctcggtgccggccatcggtggagtgcacgccggtgtcggtggcggcggaaggggctgaggtcggctccggcgaggatgcggcgaagtggcggcagcggggaggagctccggcgaggacgcggggaggaggaggagcgagcgaggagaagaagcgcggtcttcgcggccgcgggtggaggaggaacgatgtcttcgcgcgtggaatcctcggcgatgtcttgagaagatttctgagcaacattggctcacaaatagcaagaaagagaccaattttcatggatccatcagatgctttcacctacgtcatcatcagcgtcgtcgtcctcctcctcctgccgccgccgtgttcatccgacgaccggcttgtccccggtaagccgctaacctctgatgccaccgtcgtctccgacggcggcgccttcgccatgggcttcttctccccctccaactccaccccggccaagctctacctcggcatatggtacaacgacatccctgtgcgcaccgtggtctgggtcgccaaccaagaaaccccggtcacaaatggcacggccctgtccctgaccgactcctccgacctcgtcgtgtccgacgccgacggccgcgtccgctggacggccaacgtcaccggtggcgccgccggcgccggcaacggcaacacgaccgcggtgctgatgaacaccggtaacctcgtcgtccggtcgccgaacggcaccgccctgtggcagagcttcgagcacccgaccgactcgttcctgcccgggatgaagctgcggatgatgtacacgacgcgcgcctccgaccggctggtgtcgtggaggggccccggcgacccgtcgccggggagcttctcgtacggcggcgacacggacacgctcctgcaggtgttcatgtggaacgggacgcggccggtgatgagggacgggccgtggacgggcgacgtggtggacggccagtaccagacgaacagcaccgccatcaactacctcgccatcctcagccgcgacgacgaggtctccatcgagttcgccgtccccgccggcgcgccgcacaccaggtacgcgctcacctacgccggcgagtaccagctccagcggtggagcgccgcctcgtcggcgtggtcggtgctccaggagtggcccaccgggtgcggccgctacggccactgcggcgccaacggctactgcgacaacacggcggcgcctgtcccgacgtgcaggtgcctcgccggcttcgagccggcggcgagcggcggttgccggcgggcggtggcggtgcggtgcggcgacggcttcttggccgtggccgggatgaagccgccggacaagttcgtgcacgtggcgaacgtggcgacgctcgaggcgtgcgccgcggagtgcagcggcaactgctcgtgcctggcgtacgcgtacgccaacctgagcagcagcaggtccaggggcgacacgacgaggtgcttggtgtggtcaggggacctgatcgacacggccaaagttggcctcgggagcggccacagcgacacgctctacctcaggattgcaggccttgatacgggcaagagaagaaataggcagaagcacagagagctaattttggatgtcatgagtacatccgatgatgttgggaaaagaaaccttgtccaggattttgaattcctatttgtaaaatttgaggacattgctctagcaactcacaacttttcagaagcatataagattggggagggaggttttggcaaagtttacaaggcaatgataggtggtaaagaagttgctgttaaaagattaagtaaagattctcagcaaggaaccgaggaattcaggaatgaagttattcttatcgcaaaattgcagcatagaaatttggcgtggaacatgtggaaggaagagaaaaccaaggatttggcggactcatcaattattggtagttgcttacttgatgaggttttgctttgcatccatgtagcactattgtgtgttcaagacaacccaaatgacaggccacttatgtcatctactgtgttcattctggagaatgggagtagttctgcacttccagccccaagtcgccccgcctactttgcatacagaagtgatgaatcggagcaatcaagagaaaatattcagaactcaatgaatacttttaccctaacaaatatagaggggcggtaa

SEQ ID NO: 262 - protein, 769 aa, Oryza sativa
MGKTTASAVAGEDIGSDGGSGGGFQQWGQYWRYADDDEVANGEEGQPRCRPSVECTPVSVAAEGAEVGSGEDAAKWRQRGGAPARTRGGGGASEEKKRGLRGRGWRRNDVFARGILGDVLRRFLSNIGSQIARKRPIFMDPSDAFTYVIISVVVLLLLPPPCSSDDRLVPGKPLTSDATVVSDGGAFAMGFFSPSNSTPAKLYLGIWYNDIPVRTVVWVANQETPVTNGTALSLTDSSDLVVSDADGRVRWTANVTGGAAGAGNGNTTAVLMNTGNLVVRSPNGTALWQSFEHPTDSFLPGMKLRMMYTTRASDRLVSWRGPGDPSPGSFSYGGDTDTLLQVFMWNGTRPVMRDGPWTGDVVDGQYQTNSTAINYLAILSRDDEVSIEFAVPAGAPHTRYALTYAGEYQLQRWSAASSAWSVLQEWPTGCGRYGHCGANGYCDNTAAPVPTCRCLAGFEPAASGGCRRAVAVRCGDGFLAVAGMKPPDKFVHVANVATLEACAAECSGNCSCLAYAYANLSSSRSRGDTTRCLVWSGDLIDTAKVGLGSGHSDTLYLRIAGLDTGKRRNRQKHRELILDVMSTSDDVGKRNLVQDFEFLFVKFEDIALATHNFSEAYKIGEGGFGKVYKAMIGGKEVAVKRLSKDSQQGTEEFRNEVILIAKLQHRNLAWNMWKEEKTKDLADSSIIGSCLLDEVLLCIHVALLCVQDNPNDRPLMSSTVFILENGSSSALPAPSRPAYFAYRSDESEQSRENIQNSMNTFTLTNIEGR

SEQ ID NO: 263 - DNA, 1209 bp, Oryza sativa
atggcgccgccgccgccgccgccgtgctccgtgcgcgccgcgggctccaatccaattggctgcctcgaggtagcagagccgtggagcggcgccgcgccgcccccgctgccgccgctgccgggccatctgcatgtcgcggcgccggcggcggaggacgacgacgacgcgctcgccgccgccgccgccgccgtgccgtccgagcagagggtgcacgacgtcgttctgaagcaagcggcgctcgccgcggcagcgcccgagatgcggaggccggcgcagttggccgagagggagcgcgtcgccggcggcctgaacgccgccttcgatcgctgcggcgaggtctgcaaggagtacgccaagacattctacctcgcgacgcagctgatgacgccggagaggaggagggcaatctgggcgatatacgtgtggtgcaggcgaacggacgagctggtggatgggcccaacgcgtcgcacatgtcggcgctggctctcgaccggtgggagtcgcggctggacgacatcttcgccggccgcccctacgacatgctcgacgccgccctctcccacaccgtcgccaccttccccgtcgacatccagccgttcagggacatgatcgaggggatgcgattggacctaacgaagtcgaggtacaggagcttcgacgagctctacctctactgctactacgtcgccggaacggtcgggctcatgacggtgccggtcatgggcatctcgccggactcgagggccaacaccgagaccgtctacaagggggcactggctctcggcctcgccaaccagctcaccaacattctcagggacgtcggcgaggatgcaagaagaggcaggatctatctcccaatggacgagctcgagatggccggactctctgaagatgacatcttcgacggccgcgtcacggacagatggagatgttttatgagggatcagatcacgagagcgagggcgtttttcagacaggccgaagaaggcgccagcgagctcaatcaggagagccgatggccggtttgggcttctctacttctgtaccgacaaatccttgacgagatcgaggccaacgattacaacaacttcaccaagagggcctacgtcccaaaggcaaagaagattgtggctctgcctaaagcttactacagatcactcatgctcccctcttcagtgaggcactgctctagcctaacatcatcatga

SEQ ID NO: 264 - protein, 402 aa, Oryza sativa
MAPPPPPPCSVRAAGSNPIGCLEVAEPWSGAAPPPLPPLPGHLHVAAPAAEDDDDALAAAAAAVPSEQRVHDVVLKQAALAAAAPEMRRPAQLAERERVAGGLNAAFDRCGEVCKEYAKTFYLATQLMTPERRRAIWAIYVWCRRTDELVDGPNASHMSALALDRWESRLDDIFAGRPYDMLDAALSHTVATFPVDIQPFRDMIEGMRLDLTKSRYRSFDELYLYCYYVAGTVGLMTVPVMGISPDSRANTETVYKGALALGLANQLTNILRDVGEDARRGRIYLPMDELEMAGLSEDDIFDGRVTDRWRCFMRDQITRARAFFRQAEEGASELNQESRWPVWASLLLYRQILDEIEANDYNNFTKRAYVPKAKKIVALPKAYYRSLMLPSSVRHCSSLTSS

SEQ ID NO: 265 - DNA, 1353 bp, Oryza sativa
atggagcttgcggtatcagcagtaaccggtgaaatcgtcagccggttcatctccttcctcctgagcaagtactcgagccatgaaatttcagaggagaagcagctggaaagactgcagcagctgctcctacgagtatccacggtcgtcgaggaggcggatgggcgatacatcaccaactccgggatgctgatgcagctgaaggggcttgcagatgccatgtaccgaggccaccatgtcctggacatgttcaggtgcaggaacaaaattcaggagaattccatcaaggaggttagtagcccatttcctcctctcaaacgttttcgcgcaattgttgatgctgctgggaacaacaaggccaggtaccttgagctgcataaaactttgagaattttagaagcagctgttgatcacatggcagaatttgtggtgattttgggtggatgcgatcgcatgtcgcggaggccatatgatgcatacctgtacacagataacttcatgtttggccgtcatactgaaaagcagaggctcctgaatttcctgttggaatacaactcacaaggtctgcctcctgttcttccaatcattggtagccttgcagtagggaagaaaactctggttgcacatgtctgcgccgatgagagggttcaatctcagttctcttcaattttgcatttgaatgaagatgatcttttgagattagcacacagtgatactctcttatcagggaagatgttggtagttgttgaatttgtttcagatttgaatgagaagaattgggaggaattctatacatctctgacacaaatgaatcaaggaagcaaggtgatcaccataagcaggtttagaaaatcagagaaacttggtactgtgaagccaattgcacttgacatccattcatacgaagaattgagctacctcttcaagacgctcgcatttgggagtgtgaaccctaaggaccatccacgattactgcaaatagccgaagaatttgccatgcaattgcagttgaaaagttcacttgtcgcagcgaattttcttgcagatgtattgagaaggaatttggatgtcaacttctggctttgcatgctgaacaggtgcataacagtggctgaaaagaacttctccttgtacggtgagcatacaaggttacttcttgaacaaggtcatcgtgtagacatcaccaactttgattcatctccagctgctccattgcacatcgtaccaggtgttggtgccaatagtacagggaaggacttgccaagggttaaatttacagaactattactagatcctagtgttagaccaaaagatatgatatttgtcaaggatatatgtctctttgtatatgtgtag

SEQ ID NO: 266 - protein, 450 aa, Oryza sativa
MELAVSAVTGEIVSRFISFLLSKYSSHEISEEKQLERLQQLLLRVSTVVEEADGRYITNSGMLMQLKGLADAMYRGHHVLDMFRCRNKIQENSIKEVSSPFPPLKRFRAIVDAAGNNKARYLELHKTLRILEAAVDHMAEFVVILGGCDRMSRRPYDAYLYTDNFMFGRHTEKQRLLNFLLEYNSQGLPPVLPIIGSLAVGKKTLVAHVCADERVQSQFSSILHLNEDDLLRLAHSDTLLSGKMLVVVEFVSDLNEKNWEEFYTSLTQMNQGSKVITISRFRKSEKLGTVKPIALDIHSYEELSYLFKTLAFGSVNPKDHPRLLQIAEEFAMQLQLKSSLVAANFLADVLRRNLDVNFWLCMLNRCITVAEKNFSLYGEHTRLLLEQGHRVDITNFDSSPAAPLHIVPGVGANSTGKDLPRVKFTELLLDPSVRPKDMIFVKDICLFVYV

SEQ ID NO: 267 - DNA, 1968 bp, Oryza sativa
atggacatcgtcgtcggcgtcctgctcatactgggcctcatgccgatgccgttcgaggtcatcatggccgccgccgacgatggtggcggcgtgttctgcgacaacctcaagttcgtgtccgcaaccctccccaacaaaacctcctcctccccgcaccactacgccaccgccgccgccggccaagcccccgacgtggtctacgtcctcgcgctctgccgcggcgacctcaacgacacagcttgcggcgaatccgtcgcctacacgttcgcgagactgatcaacgagtcgtgcgtcgccaactacacggccggggcttactacggcgactgcaccggcgtctactccttccagaactttctcgatccttccgacgccacagaagacgaggagcccttcgagaggtggaacgtcaacaacatcaccggcgacggcgagaacgtgcggttcatcgccggcctcatccaacagcttctgtcggaaacggtggagagggcggccggcgccgcggggcggtttgcgacgggcgtcgtggacaccggcaggacgttcccgctggtgtactcgctggcgcaatgcacgccggacctgtccgccggcgactgcctggcgtgcctccgccgcctcaccggcatgatcaactccaccatggccgtgcgcatgggtgcgcagatacatgtcacacggtgctacttcaggtatgaggcgtacgtgttctacgacagcaagcctatgctgcatctcaccggcgcgccggctccggccatccccaaaaggcataagagcaagctctgggtaattcccattgtcataattcctgtggtggcatttttctgcttcattgtttactgcggctggcggagggggcacagaaaaggtataatgggattacaagcaaggagaactgataacttgcagggagaggaagaattagtttgggacctagaaggaaaaaatccagagttttcagtatttgagtttgatcaggtactggaggctacaagtaatttttctgaagtaaacaagcttggagaaggtggctttggcgccgtgtacaagggccattttcctgatggaatagagatagcagtcaagagacttgcttcacattcaggacaaggtttcatagagttcaaaaatgaagtccagctcatagccaaactacagcacaggaatttggttaggctcttggggtgttgctctcatgaagaggagaaaattttggtctatgaattcttgccaaacaaaagcttggacttatttatctttgatgaaaataaaagagctttgctggattggtacaaacgtctagaaataattgaaggaatagcacatggacttctttacctacataagcactcccgattgagtgtcatacatcgagatcttaaaccgagtaacattctcttggatagcgaaatgaaccctaaaatttcagactttgggttagcaagaatatttagctcaaataacacagaaggaaacacaacaagaagagtggttggtacatacggctacatggctccggagtatgcttctgtgggcctcttctctatcaaatccgacgtattcagctttggtgttctatttcttgagattatcagtggaaaaaagaattctggttcccatcatagtggagactttatcaatctccttggatttgcatggtcactatggggagagggaagatggcttgaactcatcgatgaatcattagtttccaaatatcctcctgcagaaaatgaaatcatgaggtgcattaacatagcattgctgtgtgtacaagagaatgcagctgatcgaccaaccatgtcagatgttgttgcaatgctaagcagcaagacgatggtcctggctgaacctaagcacccgggatatttcaatgtgagagtggcaaatgaagagcaatctgttcttactgagccatgtagtgttaatgatatgaccatatctgccataagtgctagatag

SEQ ID NO: 268 - protein, 655 aa, Oryza sativa
MDIVVGVLLILGLMPMPFEVIMAAADDGGGVFCDNLKFVSATLPNKTSSSPHHYATAAAGQAPDVVYVLALCRGDLNDTACGESVAYTFARLINESCVANYTAGAYYGDCTGVYSFQNFLDPSDATEDEEPFERWNVNNITGDGENVRFIAGLIQQLLSETVERAAGAAGRFATGVVDTGRTFPLVYSLAQCTPDLSAGDCLACLRRLTGMINSTMAVRMGAQIHVTRCYFRYEAYVFYDSKPMLHLTGAPAPAIPKRHKSKLWVIPIVIIPVVAFFCFIVYCGWRRGHRKGIMGLQARRTDNLQGEEELVWDLEGKNPEFSVFEFDQVLEATSNFSEVNKLGEGGFGAVYKGHFPDGIEIAVKRLASHSGQGFIEFKNEVQLIAKLQHRNLVRLLGCCSHEEEKILVYEFLPNKSLDLFIFDENKRALLDWYKRLEIIEGIAHGLLYLHKHSRLSVIHRDLKPSNILLDSEMNPKISDFGLARIFSSNNTEGNTTRRVVGTYGYMAPEYASVGLFSIKSDVFSFGVLFLEIISGKKNSGSHHSGDFINLLGFAWSLWGEGRWLELIDESLVSKYPPAENEIMRCINIALLCVQENAADRPTMSDVVAMLSSKTMVLAEPKHPGYFNVRVANEEQSVLTEPCSVNDMTISAISAR

SEQ ID NO: 269 - DNA, 2082 bp, Oryza sativa
atggcattctggctacttgcagacctgctgattcttctagcttccgccgccgagagcgtcgccggccagcctgctgccagttgccaggctaggtgcggcgacatcgacattccctacccgttcggcatcggccccaattgctctcgcggaaagggatttgagatcgcatgcaatccccgaaacgacagcggcgagatggtgccgacccttgccgccgccaatggcaccatccatgtgcagagcctgttggtagcgccgatcccggaggtcaaggtgatgctgccggtggcgtaccagtgctactactccaacaacagcatcaccgactcgttctacggcgaggtagacctcaacaacacaggcgtgtaccgcatctccgacagccgcaacatgttcgtcgtgattgggtgcaacaccctgtcctacacccagaacgggaacagcggcggcaaaggcccttacgccggcctctactacaccggctgcgtctcctactgtaacgactcgtcgagcgcgcgggacagcatgtgcgccggcgtcggctgctgccacatcgacatctcgccgggcctcagtgacaacgttgtctccttcgggccctggaagcgtggcttccaggtagacttcagcccctgcgactactccttcctcgtcgacaagaacgagtacgagttccgtagcgccgacctcaagatggacctcaaccgaaccatgccggtgtggctggactgggccatccgcgactccgttacctgccctccactggaggtgcaggagaagaaaccggctgggtacgcgtgtatgagcgacaacagcgagtgcgtcaactccaccaacggtcccggatactactgcaagtgcaagcaaggctacgatggtaacccctacgtcgacaaggaccaaggttgcaaggacatcaacgagtgtgatgtgtccaacaagaagaaatatccctgctacggcgtctgcaacaacatcccaggggattatgagtgccactgccgtgtaggataccagtggagtggtgaaggccccaagaaacaagagtgcagcgcaaaattccctcttgcagcaaggcttgcccttggaatcactttgggattttccttcctaattgttgctgttcttttcacgctaatgatgcacaaaaagcgaaaaatgaatgaatatttcaaaaagaatggtggttcagtgctacagaaagtggacaatatcaagattttcaccaaagatgagctaaagaaaatcacaaagaataattcagaagttcttggtcaaggaagctttggtaaggtgtacaaagggactcttgaagacaatactccggttgcagtgaagacgtcaatcgaagtaaatgaagctcgaaaggatgatttcacaaatgaagtgatcatccaatcgcaaatgatgcataataacattatcaagcttttgggttgttgcttggaagtggatgttccaatgttggtgtatgagtttgccgctaaggggaatctgcaagacattctccatggtgatgccaacatccctctcccgttgggcttacgcctagacatcgcaattgaatcagctgaaggtctaaggtacatgcactcatcaacaagtcgtaccatacgacatggtgatgtcaagccggccaacatacttttaacagataagtttatccccaagatctcagattttggaacatctaagcttcttaatgtagacaaagatttcaccatgtttgttgtaggaagtatgggctacatagatccagtattccataagaccggccatttaacacaaaagagtgatgtatacagttttggagttgtactgctagagctcatatgtagaaagccaacaatatatggtgaaaattgtagcctcatcattgagttccaaaatgcctatgatcaagagaacagtgggaggataatgttcgacaaggagattgcaaatgaagaagatatcctaatcctagaagaaattggcaggttggcaatggagtgtttgaaagaaaaggttgaagagcgacctgatatgaaggaggtagcagaacgatttgttatgctgagaagatcaaggaagtgtggatag

SEQ ID NO: 270 - protein, 693 aa, Oryza sativa
MAFWLLADLLILLASAAESVAGQPAASCQARCGDIDIPYPFGIGPNCSRGKGFEIACNPRNDSGEMVPTLAAANGTIHVQSLLVAPIPEVKVMLPVAYQCYYSNNSITDSFYGEVDLNNTGVYRISDSRNMFVVIGCNTLSYTQNGNSGGKGPYAGLYYTGCVSYCNDSSSARDSMCAGVGCCHIDISPGLSDNVVSFGPWKRGFQVDFSPCDYSFLVDKNEYEFRSADLKMDLNRTMPVWLDWAIRDSVTCPPLEVQEKKPAGYACMSDNSECVNSTNGPGYYCKCKQGYDGNPYVDKDQGCKDINECDVSNKKKYPCYGVCNNIPGDYECHCRVGYQWSGEGPKKQECSAKFPLAARLALGITLGFSFLIVAVLFTLMMHKKRKMNEYFKKNGGSVLQKVDNIKIFTKDELKKITKNNSEVLGQGSFGKVYKGTLEDNTPVAVKTSIEVNEARKDDFTNEVIIQSQMMHNNIIKLLGCCLEVDVPMLVYEFAAKGNLQDILHGDANIPLPLGLRLDIAIESAEGLRYMHSSTSRTIRHGDVKPANILLTDKFIPKISDFGTSKLLNVDKDFTMFVVGSMGYIDPVFHKTGHLTQKSDVYSFGVVLLELICRKPTIYGENCSLIIEFQNAYDQENSGRIMFDKEIANEEDILILEEIGRLAMECLKEKVEERPDMKEVAERFVMLRRSRKCG

SEQ ID NO: 271 - DNA, 2121 bp, Oryza sativa
atgttgatgatcctgccctgtagattgctgctgcgtctagtcctcgcaacccttctgattttggctgctagtacagatcaacatgtagccacgctgccgccgataacacttccaggctgcatcgacaagtgcggcaacatcagcatacccttcccgttcggcacgaagcagagcagttgcttccttccaggcttcgaggtcacctgcaacgacacattcagtccacctcgcctcttcctcggaaattctaatcctggagacaggcaaaactatcaggaatttgaagagcgctactacttgacgacggaggaaggcatgccgacacatctcatgactgatgattttttgttcatggagctgatgagcataaacctcacagagggcgtagcacgggcatatggccctgtgagctcggattgcagcctcaacgacacatatcatttggtgaagaggcagatgacgggcttggccgggccattcctcatctccacgcgcaatgctctcacagccgtcggctggaacatggaagcaaacctcgcgagatcggtgcgtggatccggcttcctcaagacctgtggtgtgcggctcgggcaacctgaatttgcaacgaatgggtcatgcctgggaggaggctgctgccagggtgaaatcactcaaggcattggctctatcgcgaaggactggtacaacttcacttcgccggacctctattccgacaacttctccaagaaatatccaaagggtgtcccgctagtgattgacttcgccatcagggatggtttttgcccagcggcaggccaggcgccgccggcgaactatgcttgtgtcagcagcaacagctcatgcgtcaacgtgaccaacggtgatggttacatctgcaactgtagtaagggatatgatgggaatccttacatacctaacggatgtcatgatattgatgaatgtgccctccgagatagccatcctgagctccgagtcctgtatccttgttcaagaaatggaatctgcatgaacagaccaggcggatatgattgtccatgcaaacgtggaatgagcggtgatggcaaagcaggaacttgctcagagaaatttcctttacaggctaagattgttgtaggtgcaataggtggtctctttattgtcgcagtccttgtgttccttgcacttgttcacagagagaaaaggaagatgagagaattttttgaaaagaatggtggtcctatattagaaaaagtcaacaacataaagatattcaagaaagaagaactcaaaccaattctgaaagctagcaatattattggaaaaggtggattcggagaggtttacaaaggccgtcttgctgataacaaactggtggccgtaaagaagtccatcaaagtcaatgctgcacaaaaggatcaatttgcaaacgagatcatcatccaatcccgagtcatccataagaacattgtcaagctgataggttgttgcgtagaagttgatatcccaattttagtatatgaatttatcactaatggcagtctcgatgacattcttcacggtagtaacggagaacctctcagtttggatttacgtttggatattgctgccgaatcagccgaaggtctggcatatatgcattcgaaaaccaccaatacaatcctgcatggtaatgttaaaccagctaacatacttttggatgacaactttgttccaaagatatctgattttgggatttcgaggctaattgccgtagataaaaatcaacacacagataaagtcattggtgacatgagttatatggatccagtttacctacaaacaggactattaacgaagaaaagtgatgtctacagttatggggttgttctcttggagctcatcagcaggaagaaggccacatattctgacaacaatagcttagttcggaattttctagatgctcacaaagagaaaaggaaagcaactgagctgtttgataaggatatcacgctggcagaagacttggacgttcttgatggtctcgtgaggattgctgtggaatgtttaaaccttgacgtggatcaacgaccagaaatgacaaaagtaacagacgatcttttcatcttgatgaaatctcgagctaaagagaccaagcagtaa

SEQ ID NO: 272 - protein, 706 aa, Oryza sativa
MLMILPCRLLLRLVLATLLILAASTDQHVATLPPITLPGCIDKCGNISIPFPFGTKQSSCFLPGFEVTCNDTFSPPRLFLGNSNPGDRQNYQEFEERYYLTTEEGMPTHLMTDDFLFMELMSINLTEGVARAYGPVSSDCSLNDTYHLVKRQMTGLAGPFLISTRNALTAVGWNMEANLARSVRGSGFLKTCGVRLGQPEFATNGSCLGGGCCQGEITQGIGSIAKDWYNFTSPDLYSDNFSKKYPKGVPLVIDFAIRDGFCPAAGQAPPANYACVSSNSSCVNVTNGDGYICNCSKGYDGNPYIPNGCHDIDECALRDSHPELRVLYPCSRNGICMNRPGGYDCPCKRGMSGDGKAGTCSEKFPLQAKIVVGAIGGLFIVAVLVFLALVHREKRKMREFFEKNGGPILEKVNNIKIFKKEELKPILKASNIIGKGGFGEVYKGRLADNKLVAVKKSIKVNAAQKDQFANEIIIQSRVIHKNIVKLIGCCVEVDIPILVYEFITNGSLDDILHGSNGEPLSLDLRLDIAAESAEGLAYMHSKTTNTILHGNVKPANILLDDNFVPKISDFGISRLIAVDKNQHTDKVIGDMSYMDPVYLQTGLLTKKSDVYSYGVVLLELISRKKATYSDNNSLVRNFLDAHKEKRKATELFDKDITLAEDLDVLDGLVRIAVECLNLDVDQRPEMTKVTDDLFILMKSRAKETKQ

SEQ ID NO: 273 - DNA, 1914 bp, Oryza sativa
atgatggaggcgaaagacgggcaagcatggctggggacgaacggatacggcagcaggagggaggaagacggcgtgtgccacgacgacagcgcgacaccggtgagggcgaacactgtcgacgagctacactcgctgcagaggaagcctcaggtagtggaggatcgccacaggctgcagcttcagtccatcagtgcgtctttggcatcgatgacatgtgggattgggccaaaactcgtcaacggtgacccagcaaggaaaaaagaaatggctggcaaggctgtgacacatcaccaacaccatatcactgtccccacgatcactgtgagcgacagtgacctcaagttcacccatgttctgtacaacttatccccttctgaactttatgagcatgcaatcaaatatgagaaagggtcattcatcacatccagtggggcgttagcgacgctatcaggagcaaagaccggtcgatcacctagggacaagcgtgttgtcaaggatgaaacaacagatgatctgtggtggggcaagggatcaccaaacattgaaatggacgagcaaacctttctgatcaacagggagagagctgttgactacttgaactcccttgataaggtgtttgttaatgatcagttcctaaactgggaccccaacaataggataaaagttcgaatcatctctgcgagggcctaccattctctcttcatgcacaacatgtgcatccggccaacatacgaggaactagagaattttggcgagcccgacttcaccatctacaatgctggacagttcccgtgcaaccgttacacgcattacatgacatcgtcaactagcatagacttaaatcttaagcggagagaaatggtcatcctgggaacacaatatgctggagagatgaagaaaggcctcttcagtgtgatgcactacctcatgcccaaaaagcagatcctctcgttgcactctggctgcaacatgggcagagggggtgatgtagccctgttttttggattgtcaggtactggaaagacaactctgtcaacagacaggaataggatcttaattggtgatgatgaacactgctggagtgataatggtatctctaacattgagggcggctgctatgctaaatgcatagatctttctcaggagaaagaacctgacatttgggatgcaatcaagtttggcacagtgttggagaatgttgttttcgatgagcactcccgtgaagttgattatacagaaaaatctgtcacagagaatacccgtgctgcttaccctattgaatacatagctaatgctaagataccatgtgttgggccacacccaaagaatgttatcctacttgcatgtgatgcatttggtgtcctccctcctgtcagcaagttgagccatgcacaaaccatgtaccattttatcagtggctacactgcattggtcgctggaactgaagatggtatcaaggagccacaggctacattttctgcctgctttggtgcagcttttataatgctccacccaactcggtacgctgccatgctggcagataagatgaacaagcatggagctaccggatggcttgtcaacactggttggatcgggggaagttatggtgtaggtgagcgaatcagcttggcctacacaaggaaaatcatcgatgccattcactcgggtgagcttttggctagaagctacaaaaagacagatgtctttggactagacatccccacaaaagtggaaggagttccatctgaattgcttgacccaataaatacctgggaagacaaagactcatacaagttgacacttctaaagctgtcagatctgttcaagagaaatttcaaggtatttgcaaattacaagaaaggtggtgttagtgatctggctgatgagattgctgctgcaggaccaaatttctga

SEQ ID NO: 274 - protein, 637 aa, Oryza sativa
MMEAKDGQAWLGTNGYGSRREEDGVCHDDSATPVRANTVDELHSLQRKPQVVEDRHRLQLQSISASLASMTCGIGPKLVNGDPARKKEMAGKAVTHHQHHITVPTITVSDSDLKFTHVLYNLSPSELYEHAIKYEKGSFITSSGALATLSGAKTGRSPRDKRVVKDETTDDLWWGKGSPNIEMDEQTFLINRERAVDYLNSLDKVFVNDQFLNWDPNNRIKVRIISARAYHSLFMHNMCIRPTYEELENFGEPDFTIYNAGQFPCNRYTHYMTSSTSIDLNLKRREMVILGTQYAGEMKKGLFSVMHYLMPKKQILSLHSGCNMGRGGDVALFFGLSGTGKTTLSTDRNRILIGDDEHCWSDNGISNIEGGCYAKCIDLSQEKEPDIWDAIKFGTVLENVVFDEHSREVDYTEKSVTENTRAAYPIEYIANAKIPCVGPHPKNVILLACDAFGVLPPVSKLSHAQTMYHFISGYTALVAGTEDGIKEPQATFSACFGAAFIMLHPTRYAAMLADKMNKHGATGWLVNTGWIGGSYGVGERISLAYTRKIIDAIHSGELLARSYKKTDVFGLDIPTKVEGVPSELLDPINTWEDKDSYKLTLLKLSDLFKRNFKVFANYKKGGVSDLADEIAAAGPNF

SEQ ID NO: 275 - DNA, 1377 bp, Oryza sativa
tggaaaggcgccgccgagatggtgctcgcgaggtgcaccgtgtacgtcggcgcagacggcgccgcgcgcgagctcggcgtggagcagaggaggaagctcgagcaggtgatcaacgacatggcggcggcgagcctccgctgcatcgcgttcgcctacaagcaagtcgtcgacggcggcgacagcgacaacgccaagatcgacgacgaggggctgacattgctgggcttcgtcggactgaaagacccgtgcagaccagaggtaaaatccgccatcgaagcttgcaccaaagcaggcatcgccgtcaagatggtcaccggcgacaacgtcctcacggctcgcgccatcgccaaggaatgcggcatcatctccggcaacgacgacgacgccgccggcgtcgtgatcgaggggcacgagttccgcgccatgtcggagcaggagcagctcgccatcgtcgacaacatccgcgtcatggcgcggtcgctgccactcgacaagctggtgctcgtccagcgcctgaagcagaagggccacgtggtggccgtcaccggcgacggcacgaacgacgcgccggcgctgaaagaagccgacgtgggcctctccatgggagtccagggcaccgaggtcgccaaggagagctccgacatcgtcatcctcaacgacaacttcgacacggtggtgacggcgacgcggtggggccgctgcgtgtacaacaacatccagaagttcatccagttccagctcaccgtcaacgtcgcggcgctcgtcatcaacttcgtgtcggcggtgaccacgggcaggatgccgctgaccacggtgcagctgctgtgggtgaacctgatcatggacaccatgggcgcgctggcgctcgccacggacacgccgacggcggggctgatgcgccgcccgcccatcggccgcgcggcgccgctgatcagcaacgccatgtggcgcaacctggcggcgcaggcggcgtaccaggtggccgtgctgctggcgctccagtaccgcggcttcggcggcgccggcgccggcgagagggcgaacgggacgatgatcttcaacgcgttcgtgctgtgccaggtgttcaacgagttcaacgcgagggagatcgagaggaggaacgtgttcgccggcgtgcaccggaacaggatgttcctgggcatcgtcgccgtcacggtggcgctgcaggtggtgatggtggagttgctgaccaagttcgccggaacggagaggctggggtgggggcagtggggcgcctgcgtcggcattgccgccgtgtcgtggcccatcgggtgggccgtcaagtgcatcccggtgccggagcggccgttccacgagatcatcacggcgaggaggaggaggagaagatcgacataa

SEQ ID NO: 276 - protein, 458 aa, Oryza sativa
WKGAAEMVLARCTVYVGADGAARELGVEQRRKLEQVINDMAAASLRCIAFAYKQVVDGGDSDNAKIDDEGLTLLGFVGLKDPCRPEVKSAIEACTKAGIAVKMVTGDNVLTARAIAKECGIISGNDDDAAGVVIEGHEFRAMSEQEQLAIVDNIRVMARSLPLDKLVLVQRLKQKGHVVAVTGDGTNDAPALKEADVGLSMGVQGTEVAKESSDIVILNDNFDTVVTATRWGRCVYNNIQKFIQFQLTVNVAALVINFVSAVTTGRMPLTTVQLLWVNLIMDTMGALALATDTPTAGLMRRPPIGRAAPLISNAMWRNLAAQAAYQVAVLLALQYRGFGGAGAGERANGTMIFNAFVLCQVFNEFNAREIERRNVFAGVHRNRMFLGIVAVTVALQVVMVELLTKFAGTERLGWGQWGACVGIAAVSWPIGWAVKCIPVPERPFHEIITARRRRRRST

SEQ ID NO: 277 - DNA, 693 bp, Oryza sativa
atggctagaagcaagtttgttgctcttagcttcgtcgtcctccttggcattggactgaccaatgctacaagggtagctaggtatgtgagcgctggaggaggcggtgggggaggcggaggtggtggtgggtcagggaatggttctgggtggggatctggctctggctcagggtatggccaagctggaggctctggtggagcatatgctagtggaggtggtggcggtggaggtggtggaggtggacaaaacggtggatctgggtatggttctggatctggttcaggttatggtcaggctggtggatatgggtcccatggtggtgcgtacgctcaaggaggcggtcaaggtggtggtggaggtggtggggcaaatggtgggtctggatatggttccggatctggctctggctatggtcaggctggtggctacggtcctcatggtggagcatatgctcagggtggcggacaaggtggtggtggtggcggtggatacaatggtggatcaggttatggttctggttctggatctggttacggccaagctggttcatacgggccctacggtggtggctatgctcatgcaggtggtcaaggtggcggcggcggcggagggcatagtggcccaggtggccatggatatggaagtggctctggaagcggttctggatctgcctatagtggtgggcacccatag

SEQ ID NO: 278 - protein, 230 aa, Oryza sativa
MARSKFVALSFVVLLGIGLTNATRVARYVSAGGGGGGGGGGGGSGNGSGWGSGSGSGYGQAGGSGGAYASGGGGGGGGGGGQNGGSGYGSGSGSGYGQAGGYGSHGGAYAQGGGQGGGGGGGANGGSGYGSGSGSGYGQAGGYGPHGGAYAQGGGQGGGGGGGYNGGSGYGSGSGSGYGQAGSYGPYGGGYAHAGGQGGGGGGGHSGPGGHGYGSGSGSGSGSAYSGGHP

SEQ ID NO: 279 - DNA, 999 bp, Oryza sativa
acttctgcggcgaggagggagctcgagccgcccggaagccatggccacggcggagcagcagcagcagatcgagcacgtccacctccccgtgcggggctcaccctccacgtcgcgcaagccggcaaaggcgagctcgggacggtggtgttcctgcacgggttcccggagatatggtactcgtggcgccaccagatgctcgccgtcgccgccgccgggtaccgcgccgtcgcgccggactggcgcgggtacgggctctccgaccagccgccggagccggaggcggcggagtacgacgacctcgtcgaggatctcctcgccatcctcgacgccctcgccgtgcccaaggcctttcttgttgggaaggactttggggccatgccagcttatagttttgctctctgtcatccaaatcgtacatgtggtgtgatgtgtttgggcatccctttcggcgttaatagttcatccttaaacaccttaccagaaggattctacattttacgttgggcgcaaccaggaagagcagaagctgactttggcaagtatgatatcaggagagtcgtgcgcactatctacatactcttctctaggaacgagatccccatagctaaggaagatcaagagatcatggatcttgcagacttatcgacacccctccccgagtggtttagtgaggaggatcttgatgtctactcatccctctatgagaagtctggttttcgatatccgctacagatgccatataggtccatgcatcaaaacaaaccaattggagatgcaaaatttcaagtcccggtgtttgttgtcatgggagagaaagattatgtcttcaagatacctggtatcgagtctgttatgaaagacggcagcatggagaagcatgcaccagacctaaagatcacctacattcctgaaggaagccattttgtgcaggagcagttccctgagtttgtgaatgagcttcttcttagcttcttgaaagaccatcctatggctgtttag

SEQ ID NO: 280 - protein, 332 aa, Oryza sativa
TSAARRELEPPGSHGHGGAAAADRARPPPRAGLTLHVAQAGKGELGTVVFLHGFPEIWYSWRHQMLAVAAAGYRAVAPDWRGYGLSDQPPEPEAAEYDDLVEDLLAILDALAVPKAFLVGKDFGAMPAYSFALCHPNRTCGVMCLGIPFGVNSSSLNTLPEGFYILRWAQPGRAEADFGKYDIRRVVRTIYILFSRNEIPIAKEDQEIMDLADLSTPLPEWFSEEDLDVYSSLYEKSGFRYPLQMPYRSMHQNKPIGDAKFQVPVFVVMGEKDYVFKIPGIESVMKDGSMEKHAPDLKITYIPEGSHFVQEQFPEFVNELLLSFLKDHPMAV

SEQ ID NO: 281 - DNA, 303 bp, Oryza sativa
atggcgaagtgggcggcggaagcgacggtgatggtggttctggcggtgacggtggcggtggcggtggtggcggcgcaggcgccaccgccggtgcagtgcgatcccgggaagctgtcggcgtgcgcggtcccgatcttctttgggactgcgccgtcgaagtcgtgctgctccaacctgcgcgcgcaggagaaggacgggtgcttctgccagtacgcgagagacccgatgtacgcgtcctacatcaatagcaccaacgcccgcaataccatcgccgcctgcggcatcgcctttcccagctgctag

SEQ ID NO: 282 - protein, 100 aa, Oryza sativa
MAKWAAEATVMVVLAVTVAVAVVAAQAPPPVQCDPGKLSACAVPIFFGTAPSKSCCSNLRAQEKDGCFCQYARDPMYASYINSTNARNTIAACGIAFPSC

SEQ ID NO: 283 - DNA, 246 bp, Oryza sativa
atgaggacgcaacgcagctacctttgcaaggtgctcctgatggtcctcgccctcatctgcaccctgcacactgcctcggtacaaggagggagagcaggagcagcagatgcaattggtaggaacggagcgctgaatccaccacggtacccggtgcccaggattcccggcgaaccttacacacgcccgggacggggatgcaccgttgcatacggatgctatggaggtcctccagctgccaaaccatga

SEQ ID NO: 284 - protein, 81 aa, Oryza sativa
MRTQRSYLCKVLLMVLALICTLHTASVQGGRAGAADAIGRNGALNPPRYPVPRIPGEPYTRPGRGCTVAYGCYGGPPAAKP

SEQ ID NO: 285 - DNA, 759 bp, Oryza sativa
atgagcatggcaagggagcactttgtgcttattcatggagaagggcatggatcctggtgttggttcaagcttcgttggctccttgagagctctggctaccaagtaacatgcatagaccttgctggagctggtgttgaccctaccgaccccaacacagttcaatcgtttgagcagtatgacaagccgctcctggacctcatctcagctataccagaggatgagaaggtgattttggttggacatggttcaggagggttgagtcttattcatgcaatgcaccaatttgttgacaggattagacaagcaatttttgtggcagctacgatgctaccatttggacttcaaactgacgaagataagaaagatggtttaccaacattgcctgagaatgagatcaatttgatattcggcacaggagcagatgatcctccaacaactgctgccctgagaccagaattccagagagagagattatcccaacagagtcctgaagaggaatcagtactcgcttcaatgctgatgcgtccatggcctgtgacagctattagcactgcaagctttgaaggagacgatgagagactaaatcgaatcaaacgggttttcataaagacagaacgtgaccacatgctggaccctcagcagcaagattccatgatcaagaagtggccgcccagtgaggttttggaaatagatacggatcatagcccctttttttcagcaccagaacagctctttaatctaatagtcaaatccctatga

SEQ ID NO: 286 - protein, 252 aa, Oryza sativa
MSMAREHFVLIHGEGHGSWCWFKLRWLLESSGYQVTCIDLAGAGVDPTDPNTVQSFEQYDKPLLDLISAIPEDEKVILVGHGSGGLSLIHAMHQFVDRIRQAIFVAATMLPFGLQTDEDKKDGLPTLPENEINLIFGTGADDPPTTAALRPEFQRERLSQQSPEEESVLASMLMRPWPVTAISTASFEGDDERLNRIKRVFIKTERDHMLDPQQQDSMIKKWPPSEVLEIDTDHSPFFSAPEQLFNLIVKSL

SEQ ID NO: 287 - DNA, 885 bp, Oryza sativa
atggccaccacgaggagcggcgtcggcggcgccatcagcgacccatttgcgacgccggggttccgcttctacccgacggaggaggagcttctcggcttctacctccgccaccgcctcgccggcacgaggcccgacgtcgagcgcgtcatccccgtcgtcgacgtctacggctaccacccgtcccagctcgccgccctggccggggaggcgagcgcgcgcgacacggagcagtggttcttcttctgcccgcgcgccgagcgggagctccacggcggccggccggcgcgcaccacgccgtcggggtactggaaggccacgggatccccgtcctgcgtcatctcctccgccacaaacagggtcatcggcgtcaagcgcaccatggtgttctaccagggccgcgcccccaccggcaccaagacccgctggaagatgaacgagtacaaggccgtcgccgacgacgccgacgccgccgccgccgccatgctccacccaatggcgcctcccaggctgaggaacgagctgggagtgtgccgggtgtacatcagcacgggcacgctgagatcgttcgaccgccggccgctcgataatcaagcggcggcgcccacccagcaacaggtgatgccatctttgacggcggcggcggcggtgaacacgaacctctgcggcggcggcggcggcgtcgtgttcgccggtgcacaaggagacagctcccgcgactgcagctcgtcgtcggggtcgcgagaactcgccggcggcgccgatgggtctgaagacgacgccatcgactggaactcgctcatcagtagcgccactgctgatgatctcggcttcaacaccgtcgttggttttgatcctagcatcgtcggatcatggccacaagtctag

SEQ ID NO: 288 - protein, 294 aa, Oryza sativa
MATTRSGVGGAISDPFATPGFRFYPTEEELLGFYLRHRLAGTRPDVERVIPVVDVYGYHPSQLAALAGEASARDTEQWFFFCPRAERELHGGRPARTTPSGYWKATGSPSCVISSATNRVIGVKRTMVFYQGRAPTGTKTRWKMNEYKAVADDADAAAAAMLHPMAPPRLRNELGVCRVYISTGTLRSFDRRPLDNQAAAPTQQQVMPSLTAAAAVNTNLCGGGGGVVFAGAQGDSSRDCSSSSGSRELAGGADGSEDDAIDWNSLISSATADDLGFNTVVGFDPSIVGSWPQV

SEQ ID NO: 289 - DNA, 1545 bp, Oryza sativa
atgggtcgatcgaaacgggaagttgccccgccacctcaagctttgccggcatccttcccatctggcatgtggctggctactccgccgatgcaggcctcctttgctcccggtggctggcaaggtacagcggctgcacctggtggctggcaaggtatggcgccaccgcagccgccgcaggctccattatttgcatacggcgccaatacttctgctccccatctggcccagatgaagcaagggtcagatcgtagttccatggacgattccttgtcagatctgcaagaaagtggtatggactcacgtccacctggtggattcttaagttactttcaggatccatcaagtttacagaatcatcaaccttctataccactaaattattatgctactcagcaagcagcaccatgggcaccttcacctgcagaataccgaagtccagttacaaaatcaggtccaggagaacaacaccctatcaacattgatagtggtggtgaagaaacccccactgttaggactgagaagcggttgacatggacacatgaagaggacataaggctagtgagtgcttggttgaacaacttgaatgattcgatcaatggtaatttcaagaaaaatgattgttattggggagatgttacaactgcctacaatagcaccactccgagaaataggatgaggcaagaaaaacaaatcaaggaccgctttcataaaattaagaaaaatgttggccgtttttgctgtgcttataaggaggtgaaatctatctatgttagtggacaaaatgaactacaattgatggagaaggtccatgcaacatatgaagcagattacaaggaaggccaatttacatttctgcattgttggaaagctctccgtgaccaaccaaagtggcatgcttacttggaggaacttgagaagccaaacaaaacaaagtcagataatgaagtggaagtaagggaacttacatccactcctaatagccctgaagatattatacgtcctgaaggaaccaaagctgctaaggcgcggcgtaatggtaaagacaaacgcaaaaggaaggcaaaggtttatctatcggatatggatgatgagattgacaagcctaaagaagttcagaacatggcagataaaggtcgcgatgagctactggagactcagaggcgtgtttctagtgagaatcttgaatcaaaaaggttagctcacctggcagccatggagcacaaggaggcggttatgttggaaacatatcgggctctcatgttgcaagatacaaaagatatgcctgatgatgtcagatttgagcatgtgatggcattgaagagtatgagggaaaagttgtttcctaaaactaaggtatcgaagatgctcattttggctgcttgttttggcagtgcttcagcaagagaagctacttattacataattttcagtaatccaccgattttatcaaaacagaacttgtgttctaactatctactcagtatgtcgttgtatgggtcactgttatggcctatgaatgatgtatggatcattgtaatagactaa

SEQ ID NO: 290 - protein, 514 aa, Oryza sativa
MGRSKREVAPPPQALPASFPSGMWLATPPMQASFAPGGWQGTAAAPGGWQGMAPPQPPQAPLFAYGANTSAPHLAQMKQGSDRSSMDDSLSDLQESGMDSRPPGGFLSYFQDPSSLQNHQPSIPLNYYATQQAAPWAPSPAEYRSPVTKSGPGEQHPINIDSGGEETPTVRTEKRLTWTHEEDIRLVSAWLNNLNDSINGNFKKNDCYWGDVTTAYNSTTPRNRMRQEKQIKDRFHKIKKNVGRFCCAYKEVKSIYVSGQNELQLMEKVHATYEADYKEGQFTFLHCWKALRDQPKWHAYLEELEKPNKTKSDNEVEVRELTSTPNSPEDIIRPEGTKAAKARRNGKDKRKRKAKVYLSDMDDEIDKPKEVQNMADKGRDELLETQRRVSSENLESKRLAHLAAMEHKEAVMLETYRALMLQDTKDMPDDVRFEHVMALKSMREKLFPKTKVSKMLILAACFGSASAREATYYIIFSNPPILSKQNLCSNYLLSMSLYGSLLWPMNDVWIIVID

SEQ ID NO: 291 - DNA, 456 bp, Oryza sativa
atggagtaccaggggcagcatggtggccacgccagcagccgcgccgacgagcacggcaaccctgcagtgaccaccggaaacgcacccaccgggatgggcgccggccacatccaggagccggcgagggaggacaagaagaccgacggcgtcctccgccgctccggcagctccagctccagctcatcctctgaggacgatgggatgggaggaaggaggaagaaggggatcaaggagaagatcaaggagaagctccccggcggcaacaagggcaacaaccagcagcagcagcaggagcacaccacaacaacgaccggcggcgcgtacgggccgcagggccacgataccaagatcgccaccggcgcacacggcggcaccgccgccaccaccgcggacgccggcggcgagaagaagggcatcgtggacaagatcaaggagaagctccccggccagcactga

SEQ ID NO: 292 - protein, 151 aa, Oryza sativa
MEYQGQHGGHASSRADEHGNPAVTTGNAPTGMGAGHIQEPAREDKKTDGVLRRSGSSSSSSSSEDDGMGGRRKKGIKEKIKEKLPGGNKGNNQQQQQEHTTTTTGGAYGPQGHDTKIATGAHGGTAATTADAGGEKKGIVDKIKEKLPGQH

SEQ ID NO: 293 - DNA, 852 bp, Oryza sativa
atgggggctcattcttcagcagcagcagcagctctgttcactggctttcttgccttggctacacttgtgagctgcaacactgaaggtgacattctgtacgcgcaaaggctggcatggaaggaccccttcaatgtgctgcagagttgggatccaacccttgtaaatccctgcacctggttccatgtcacctgcaacaataacaactccgtcgtccgcgtggatttggggttagcaggtctatcaggtcctctgattccacagctgggaggactgagttaccttcagtaccttgaactgtatgggaatgagctgaatggatcaataccagcagcactgggcaacctgagcagtcttgtcagccttgatctccagggcaacctgctcactggcgcgataccggattcgctaggcgccattagcaccctgcgaaatctgtatgtagtttatgtccagatgttgccagatacaagtttttccaaagattatggtgaaatttgtctgttgtttggatttgaaaattttgtgttctgcaggaggttgtatgggaacaacctgactggcaccataccacaatctttgggcagcctgacgagccttgtcaaattggagcttcagaagaattcattgagtggcaccatccctgcttctctcggcaacatcaagacattggagttgttgcgactgaacaaaaattcacttaccggcacagtgccaatggaagtcctctcccttgtccttgtcggcaacttgactgagctaaatgttgctggaaacaatttggacggcactgtcggatcaactgggtggagagtgactaccatcattcaggacaatctgaagacctcaggctga

SEQ ID NO: 294 - protein, 283 aa, Oryza sativa
MGAHSSAAAAALFTGFLALATLVSCNTEGDILYAQRLAWKDPFNVLQSWDPTLVNPCTWFHVTCNNNNSVVRVDLGLAGLSGPLIPQLGGLSYLQYLELYGNELNGSIPAALGNLSSLVSLDLQGNLLTGAIPDSLGAISTLRNLYVVYVQMLPDTSFSKDYGEICLLFGFENFVFCRRLYGNNLTGTIPQSLGSLTSLVKLELQKNSLSGTIPASLGNIKTLELLRLNKNSLTGTVPMEVLSLVLVGNLTELNVAGNNLDGTVGSTGWRVTTIIQDNLKTSG

SEQ ID NO: 295 - DNA, 1371 bp, Oryza sativa
atggtttatggtaaagtatcaaacagtaaaggatgtgtcagatctggtctcaataagagggcaagatatggtagttttcggcttcaccgcctacctcctgatattatctgcgacatattttcacgattacatttcaaagaagctgcaaggacgagcatggtgtctaggagctggagaaggctttggagatgctacccaaatcttgtcttcaccagacaaacaatgctccatggcagcataacagctgacgaccgcctggctgctaccttcatctctcgtgtaaacagcatcttgtggcagttcaggtcatcctctctggagaatttcatagtgaaattccctctccttgggagagatgatgcacatcacattgacggatgggttagcttctctgctgcttcaagagctgggcagattgttcttgatctctgtccagaagatcaagaggacactgacatgatgaatggcatgtacagtttccccctgcatatcttcttctctggtgacaactgcgtcaggtctctctccctagggttcgtctccctgacaatacctcctgatctcaatctcagtggcttcacaaacctgaagaagcttggattgcacatggtgtccatcaggggagatctgcagtgcctgctctcccactgcaatgttttggagtggttaagcctgacacagtgttcattgcaacatcggagcatctgccagaagttgtgccggttgcggtatctgtgcgtgcgcaagtgtaggctgcagaagctgcatctgcaagcaccgaatctgacagaattcgagctcaccaactatccgataccgattgtgcttgccgaatgcctgaacttgtcggtggcgacgatcgagctggtgtcattctcggattgtttgagctatgtctccactgagcttccagctggtggtcttcatcgcgtgcaggatcgtctctccatcaacatgacagtcagaactgagggaagttcggacaatatcagcggaatccttcgcctggcttcgctactggagatggcaccatgtctggaagagctggaactcaatatgtactgtcctagtgcaccgatctacacaaagcgtggtcagttagataaattaagttcagtgtgtgtgcacaagcatctcaggactgtacgcatgacaggattcgatagtacacgtggacagcttgaactggcgttccaaattcttaggagtgcacccaatcttgaccgtctgatcgttgatccgatggtcagggttgcatggagcctgcgccttgattggtcggagcaagctgatctgatgctcgttcgaaggatgatggccgagaaccgccttctcagaagcgagtaccgtcacatgattacccttctatga

SEQ ID NO: 296 - protein, 456 aa, Oryza sativa
MVYGKVSNSKGCVRSGLNKRARYGSFRLHRLPPDIICDIFSRLHFKEAARTSMVSRSWRRLWRCYPNLVFTRQTMLHGSITADDRLAATFISRVNSILWQFRSSSLENFIVKFPLLGRDDAHHIDGWVSFSAASRAGQIVLDLCPEDQEDTDMMNGMYSFPLHIFFSGDNCVRSLSLGFVSLTIPPDLNLSGFTNLKKLGLHMVSIRGDLQCLLSHCNVLEWLSLTQCSLQHRSICQKLCRLRYLCVRKCRLQKLHLQAPNLTEFELTNYPIPIVLAECLNLSVATIELVSFSDCLSYVSTELPAGGLHRVQDRLSINMTVRTEGSSDNISGILRLASLLEMAPCLEELELNMYCPSAPIYTKRGQLDKLSSVCVHKHLRTVRMTGFDSTRGQLELAFQILRSAPNLDRLIVDPMVRVAWSLRLDWSEQADLMLVRRMMAENRLLRSEYRHMITLL

SEQ ID NO: 297 - DNA, 1893 bp, Oryza sativa
atgccatggcaaaccatgcaccggctccagccgccgtcaactgcgtgccacgagagagggaagccctgctggccttcaagcgaggcatcactggcgaccccgcagggcgcctcgcctcgtggaaggaagacgaccatgactgctgccggtggaggggcgttagattatagccctttggagttcaacgcggtagctttggtcggccggataacgtcttctttgctttctctggagcatctagagcaccttgacctcagcaacaacaacctcacggggccggatggccgtttcccggtgtttgtggcctcccttcgcaacctacaatatcttgatctctctggtttgggattcactggtatggtgccatatcagcttggtaacctttcaaagctggaatttcttgacctttcgggaacaggtatgcaatcagcagatatatcatggctaacacgtctacaatggttgaagtacctttacttgtcatcagtaaatcttagcgcgatatctgattgggctcatgtagtaaacaagatcccatcactaacggtgctttctctctctggttgctcacttacacgtgtagaccactcgctcaaacacgtaaacctcactagacttgagaagctccatctctctggcaacgattttagccaccctttgtcatcttgctggttttggatcttgaaaaccctcatctacctcgaccttgaatcaaccggtttatatggtcgatttccaaatgcaataaccaacatgacgtccctccaggtcttggatttttcaagaaacaataatgcgggtattttggaaccaattctgctaaggaacctttgcaacttagaaagtctgaaccttcaattgggcctcttgtctggtaacatgacagagctgctagagagtttgagtcattgctcaccaaacaaattgcggaaattatatttgtccaacaacaatattacgggaactctaccagctcagagtatgggccaatttaccagcttagccaatattggtttctctttcaaccagctcacagggcacgtgcctcctgagattggtaaactagctagtttgactcaccttgacctaagtgaaaataaattaacaggaaccatcacagatgaacacttcggtggtctagtgagcttaacatacattgatttatcttacaacaaactcaagattgttatagaccctgaatggttaccaccatttaggcttgaaactgcgtattttgcatcttgtcaaatgggtcctctgtttcctgcctggctccggtggtcatccgacattgatatgattgatatttcaagcgctaatataatagacgagtttccagattgggtctctacagcattttcaaaggccatatatttggacatgtctaataacaaaatcagcggtaacctgccaaaaaatatgaaaatcatgtctctggaagaactctatctaaattcaaacagaataatcggtgaagtaccaacgttgccgacaaacctcacctatttggacatctcaaataacatactatcagggcttgtcgcatcaaacttcggagcgccaagactagatactatgaatctatcctcaaacagcatccaaggccagattccaagttcgatttgcaggttgaaatatttgagcaccttggatttatccaacaatcttttgaacgggaaacttcctcgatgcattgggatgagaaatcttcagaagcttctactaagtaataataacttatctggcacattcccatctttactgcaaggctgcacactgctacgttatatagacctatcatggaataggttttatggaagattaccgagttggattggagacttccaagaattagtttctctacaactgaggaacaatactttttcttggtaa

SEQ ID NO: 298 - protein, 630 aa, Oryza sativa
MPWQTMHRLQPPSTACHERGKPCWPSSEASLATPQGASPRGRKTTMTAAGGGALDYSPLEFNAVALVGRITSSLLSLEHLEHLDLSNNNLTGPDGRFPVFVASLRNLQYLDLSGLGFTGMVPYQLGNLSKLEFLDLSGTGMQSADISWLTRLQWLKYLYLSSVNLSAISDWAHVVNKIPSLTVLSLSGCSLTRVDHSLKHVNLTRLEKLHLSGNDFSHPLSSCWFWILKTLIYLDLESTGLYGRFPNAITNMTSLQVLDFSRNNNAGILEPILLRNLCNLESLNLQLGLLSGNMTELLESLSHCSPNKLRKLYLSNNNITGTLPAQSMGQFTSLANIGFSFNQLTGHVPPEIGKLASLTHLDLSENKLTGTITDEHFGGLVSLTYIDLSYNKLKIVIDPEWLPPFRLETAYFASCQMGPLFPAWLRWSSDIDMIDISSANIIDEFPDWVSTAFSKAIYLDMSNNKISGNLPKNMKIMSLEELYLNSNRIIGEVPTLPTNLTYLDISNNILSGLVASNFGAPRLDTMNLSSNSIQGQIPSSICRLKYLSTLDLSNNLLNGKLPRCIGMRNLQKLLLSNNNLSGTFPSLLQGCTLLRYIDLSWNRFYGRLPSWIGDFQELVSLQLRNNTFSW

SEQ ID NO: 299 - DNA, 1902 bp, Oryza sativa
atggggcaactccataatttgatgcttctgctgccgtgcctgatcttctctacgctactgcgcacagaggcgatgagtgtagctccagtgaaagtgagcaccacacccatcttccccacaatcccaagaggtcagacgaacaaggacttccaggtgctactgcgcgtcgaggcgccgccggcggccgatctcaacagccatgtccccttagacgtagtcgcggtgcttgatgtcagcggcagcatgaatgatccggtggcggcggcgtcgccgaagagcaatctgcaggggtcgaggttggatgtgctcaaggcgtccatgaagtttgtcatcaggaagcttgctgatggtgatcgcctctccatcgtggcgtttaacgatggacccgtcaaggaatatagctccggcttgttggatgtttccggcgatggccggagcatcgccggaaaaaagattgaccggcttcaggcccgtggtggcactgcgcttatgccagccctggaggaggccgtcaagatccttgatgagcggcaaggcagcagccggaaccacgtagggttcatcctcctcctcaccgacggcgacgacacgaccggattccggtggacccgcgacgccatccatggcgccgtcttcaagtaccccgtccacaccttcggcctgggcgcgtcccacgacccggaggcgctgctccacatcgcgcaaggatcgcgcggcacctactccttcgtcgacgacgacaacctcgccaacatcgccggcgccctcgccgtgtgccttggcgggctcaagaccgtcgccgccgtcgacacgcgcgtcagcctcaaggccgccgagctaagcggcggcggcgcgcggatagtgcgcgtagactccggcggctacgagagcagcgttgcttgcggcggggcctccggtgaggtcgtcgtcggcgtgctctacaccggcgaggtgaagaacttcgtcgtccacctccacgtgccggctgcttcgtcgacgaccttgaccttctcgtcggtggagtgcggcggctactacgacgccgccacggtctgcgaccactgccatcaccgtcaccagcagcagctgctcgccgtcggctactcgtacagccacgctccgggcgccgcctctgcagcggtgtccgtcgaagggcacggcgtgttcgtcgagaggcccgaggtggcggccgtcttcgtctccgtcgacggcgtcggcgtcggcggcggccgacagcgacaaatccccctcccctcccccgtcgtgatgcagcacatggtccggttcgagctgctggagctcgtcgccggcttcgcggaagccgagatggcgtcgaagccggcggcgacgacgacgcagccgcgcgccgccgacgtgctgcagggcaagtgggaggagttccggcgagcccggcagttctggggcggcgtcgagctggacggcgtggagaaggaggtggacgccatggtggccagcctcaggagcgggctagcctacgtcagctcgtgggtgtcgagccaccagatgcagcgcgccaccgccatgggctcgccggagaaggtggtggccgagttcatgactccggcgatggtgatcattgtggaggaggcgcggaagctaccgccaccaccgccgccgccgccggcagctgctgaggcggcgagagagaggcccagcggctgcgatggcggcgacgatatccatcacgtgatccggcagcggcttgagctgtggtcaaaggtgagacgcgaggtgccgctcatgtaccagccgtcgccggagcaggaagacgtccagctgaccgccgtgttccgggaggcgtcgctggaggccatcgaccgagcaatgcaccacgacatctacctggccgttgtgcacgtgagcaaccagaggcgatgctag

SEQ ID NO: 300 - protein, 633 aa, Oryza sativa
MGQLHNLMLLLPCLIFSTLLRTEAMSVAPVKVSTTPIFPTIPRGQTNKDFQVLLRVEAPPAADLNSHVPLDVVAVLDVSGSMNDPVAAASPKSNLQGSRLDVLKASMKFVIRKLADGDRLSIVAFNDGPVKEYSSGLLDVSGDGRSIAGKKIDRLQARGGTALMPALEEAVKILDERQGSSRNHVGFILLLTDGDDTTGFRWTRDAIHGAVFKYPVHTFGLGASHDPEALLHIAQGSRGTYSFVDDDNLANIAGALAVCLGGLKTVAAVDTRVSLKAAELSGGGARIVRVDSGGYESSVACGGASGEVVVGVLYTGEVKNFVVHLHVPAASSTTLTFSSVECGGYYDAATVCDHCHHRHQQQLLAVGYSYSHAPGAASAAVSVEGHGVFVERPEVAAVFVSVDGVGVGGGRQRQIPLPSPVVMQHMVRFELLELVAGFAEAEMASKPAATTTQPRAADVLQGKWEEFRRARQFWGGVELDGVEKEVDAMVASLRSGLAYVSSWVSSHQMQRATAMGSPEKVVAEFMTPAMVIIVEEARKLPPPPPPPPAAAEAARERPSGCDGGDDIHHVIRQRLELWSKVRREVPLMYQPSPEQEDVQLTAVFREASLEAIDRAMHHDIYLAVVHVSNQRRC

SEQ ID NO: 301 - DNA, 939 bp, Oryza sativa
atggcgtcccaacgccggcgatcatccgccgccaccatcgccgtcttcttcttcctcctctccttgttagcggtgttcttccagccggccgccgcctactaccaccctcaggggaagaggcagaccgtcgccgtcttctggggacgcaacaaggccgagggctcgctccggcaaacctgcgacaccggcgactacaacatcgtcatcatctccttcctcagcgtcttcggccatggcaagtactggctcgacctctccggccacgacctccgagacgtcggcgccgacatccgccactgccagtccaagggcgtctacatgctcctctccatcggcggcgacggcgacggctactccctcccttcctccaagtccgccgccgacgtcgcctacaacctctaccactccttcctcggccgcccacgcgccggcatcttccgccccttcggcgacgacaccatcgtcaacggcgtcaacttcttcatcgaccacggccccggcgaccactacgacgacctcgccaaccgcatcaacgactacaaccagaacatccacgaccccatcggcatcatgctgacggcgacggtgaggtgctcgtaccctgacccgaggatgaagaaggcgctggacaccaagctgttcacgcagatccacgtgaggttctacgacgacccgaggtgctcgtacaaccacgcggggctcgccggcgtcatggcgcagtggaacaggtggtcggcgaggtacccaaacagccggatcttcctggggctcgcggcggcgaacgtgacggggaagaacgacatggtcggcgtcggggagctcagccggaagctgctgccggcggtgcagaagacggagagctacgcgggagtgacgctctggaacagctactacgactccaagactcactacggaagatatgtcaagcactgggcttaa

SEQ ID NO: 302 - protein, 312 aa, Oryza sativa
MASQRRRSSAATIAVFFFLLSLLAVFFQPAAAYYHPQGKRQTVAVFWGRNKAEGSLRQTCDTGDYNIVIISFLSVFGHGKYWLDLSGHDLRDVGADIRHCQSKGVYMLLSIGGDGDGYSLPSSKSAADVAYNLYHSFLGRPRAGIFRPFGDDTIVNGVNFFIDHGPGDHYDDLANRINDYNQNIHDPIGIMLTATVRCSYPDPRMKKALDTKLFTQIHVRFYDDPRCSYNHAGLAGVMAQWNRWSARYPNSRIFLGLAAANVTGKNDMVGVGELSRKLLPAVQKTESYAGVTLWNSYYDSKTHYGRYVKHWA

SEQ ID NO: 303 - DNA, 873 bp, Oryza sativa
atgggcctcgtgcacgcactcctccccttcgcagcagcagcagcattgctgctcctcgccgcgccgccgccggcgacggccgacgacccgggcctcgccgtctactggggccgccacaaggaggagggctcactgagagaggcctgcgacaccggccgctacaccaccgtcatcatcaccttctacaacgccttcggccacggccgctactccctcgacatctccggccacccgctcgccgccgtcggcgccgacatcaagcactgccagtccaggggcatcaccgtgctcctctcaatcggcggccagggcggcgcctactccctccccaccaacgcctccgccgccgacgtcgccgacaacctctggaacgcctacctcggcggccaccgcgccggggtggcgcgccccttcggcgacgacgcggcggtggacggcatcgacttcttcatcgaccagggcggcgccgaccactacgacgacctcgcccggcggctcgacggctacaacaagtactaccggggcagggtcggcgtgctcttgacggcgacgacgaggtgctcgtacccggaccaccggctggagaaggcgctggcgacgggggtgttcgcgcgcatccatgtgaggatgttcggtgacgagcagtgcaccatgtcgccgaggtactcgtgggagaagtgggcggcggcgttccccggcagcaaggtgtacatcgggctggtggcgtcgccggagcaggacagcgcgtggatgtttcagaaggatctctactacgagatgctgcagttcgtcaggtcgctgcccaactatggtggcttggccatctatgacaggtacttcgacaagaaggccaactacactggtgagggttaa

SEQ ID NO: 304 - protein, 290 aa, Oryza sativa
MGLVHALLPFAAAAALLLLAAPPPATADDPGLAVYWGRHKEEGSLREACDTGRYTTVIITFYNAFGHGRYSLDISGHPLAAVGADIKHCQSRGITVLLSIGGQGGAYSLPTNASAADVADNLWNAYLGGHRAGVARPFGDDAAVDGIDFFIDQGGADHYDDLARRLDGYNKYYRGRVGVLLTATTRCSYPDHRLEKALATGVFARIHVRMFGDEQCTMSPRYSWEKWAAAFPGSKVYIGLVASPEQDSAWMFQKDLYYEMLQFVRSLPNYGGLAIYDRYFDKKANYTGEG

SEQ ID NO: 305 - DNA, 879 bp, Oryza sativa
atggcgttcggacgccgttcactcttcttgccggtggtgggcgtcgcggccatcctgctgctcgccgccggccacgcgaccgccgtcaacaccggcgagaccgtcgtgttctggggccggaacaaggacgagggctctctccgtgaggcctgcgacaccggcctctacacctccgtcatcatctccttcctcgccgtcttcggccacggccgctactccctcgacctctccggccacgacgtctccgccgtcggcgccgacatcaagcactgccagtccaagtacatccccgtgctcctctccatcggcggccagggcggcgcctactccctccccaccaacgcctccgccgccgacgtcgccgaccacctctgggactccttcctcggcggcggccgagccggcgtgccccgccccttcggcgacgcggtggtggacggcgtcgacctcttcatcgaccagggcggcgccgagcactacgacgagcttgcccggcggctgttcagccactacaagttcgagatgctgctgacggcgacgacgaggtgctcgtacccggaccaccgcctcgacatggcgctggcgacggggctgttcacgcacatccacgtccgggtgttcggcggcggcggcgacgccggctgcacgacgcgccacagggcgtcgtgggagaggtgggcggcggcgtaccccggcagcctggtgtacctcggcgtggtggcctcgccggagcaggacgccaacgcctacctgccgcgtaaggttctcttctccgacgtgctcagccacatcgtcgagaagcccaactatggtggattgatgatctgggataggtactacgacaagaagaccggctactccgctggaaaagttttttaa

SEQ ID NO: 306 - protein, 292 aa, Oryza sativa
MAFGRRSLFLPVVGVAAILLLAAGHATAVNTGETVVFWGRNKDEGSLREACDTGLYTSVIISFLAVFGHGRYSLDLSGHDVSAVGADIKHCQSKYIPVLLSIGGQGGAYSLPTNASAADVADHLWDSFLGGGRAGVPRPFGDAVVDGVDLFIDQGGAEHYDELARRLFSHYKFEMLLTATTRCSYPDHRLDMALATGLFTHIHVRVFGGGGDAGCTTRHRASWERWAAAYPGSLVYLGVVASPEQDANAYLPRKVLFSDVLSHIVEKPNYGGLMIWDRYYDKKTGYSAGKVF

SEQ ID NO: 307 - DNA, 870 bp, Oryza sativa
atggcgttccggcgccgttcatgcatcccggcggctctggccgtcttcttcctgctgctcgccggccagtcaaccgccggcgaagaccagaccgccgtaatctggggccgccacggcgacgagggcaccctccgtgaggcctgcgacaccggccactacaacaccgtcatcatctccttcctcagcgtcttcggccacggccgctactccctcgacctctccggccacgacctccgccgcgtcggcaacgacatcaagcactgccagcgcaagggcatcgtcgtgctcctctccatcggcggccagggcggcgactattccctcccctcctcccgctccgccgccgacgtcgccgacaacctctggaacgcgttcctcgccggccgccgcaagggcgtgctccggccattcggcaacgcggcggtcgacggcatcgacttcttcatcgaccggggctccggcgaccactacgacgagctggccaggaagctctacagctacagaaacaacaaggggaagggggtgatgctgacggcgacgccgcggtgcaggttcccggaccggcggctggagaaggcgctggcgacgggggtgttcgcgcgcatccacgtgaggatgttcggcgacgacgtgaactgcacggcggcgccgagggagtcgtgggagaagtgggcggcggcgtacccggcgagccaggtgtacctcgggctggtggcctcgtcggagcaggacccgggatacctgtcgcccaagccactctactacacgctggtgatgtacatcagagacaggctcaactacggtggcaagatgatctgggacaggtactacgacaagaagaccgactactccattggaaaacttatttaa

SEQ ID NO: 308 - protein, 289 aa, Oryza sativa
MAFRRRSCIPAALAVFFLLLAGQSTAGEDQTAVIWGRHGDEGTLREACDTGHYNTVIISFLSVFGHGRYSLDLSGHDLRRVGNDIKHCQRKGIVVLLSIGGQGGDYSLPSSRSAADVADNLWNAFLAGRRKGVLRPFGNAAVDGIDFFIDRGSGDHYDELARKLYSYRNNKGKGVMLTATPRCRFPDRRLEKALATGVFARIHVRMFGDDVNCTAAPRESWEKWAAAYPASQVYLGLVASSEQDPGYLSPKPLYYTLVMYIRDRLNYGGKMIWDRYYDKKTDYSIGKLI

SEQ ID NO: 309 - DNA, 855 bp, Oryza sativa
atgaagatgaaggctctcctccccgtagccgccatgctgctcctcgtctccggccagctcgccgccccggtcaccgccgacggctacgtcggccagctcgccgtgttctggggccgccacaaggaggagggctcgttgcgcgaggcctgcgacaccggccgttacaacatcgtcgtcatcaccttctacaacgtcttcggctaccagcgcggcaggtacggcctcgacttctccggccacccggtcgccgccgtcggcgccgacatcaagcactgccagtccaagggcgtccaggtcctcctctccatcggcggccagggcggcgagtactcgctcccgtcctcccagtcggcctccgacgtcgccgataacctctggaacgcctacctcggcggccgccgcgccggcgtgccccgccccttcggcgacgccgtcgtggacggcatcgacttcttcatcgaccagggcggcgccgaccactacgagcagcttgcccggcagctgcacggccgcggcgtgctgctgacggcgacggtgaggtgcgcgtacccggacagccggatggaggcggcgctggcgacgggggtgttcgcgcgcatccatgtccggatcttcggcgacgaccagtgcaccatgttccccaaggacgcgtgggagaagtgggcggcggcgtacccgcggtgcacggtgttcctgacggtggtggcgtcgccggagcaggacgaggggtacatgttccagaaggatctctactacggcgtgcagcagttcatcgacaaggagcccaactacggagggatcgccatctgggacaggtactacgacaagaaagccaactacagtggtgagggctaa

SEQ ID NO: 310 - protein, 284 aa, Oryza sativa
MKMKALLPVAAMLLLVSGQLAAPVTADGYVGQLAVFWGRHKEEGSLREACDTGRYNIVVITFYNVFGYQRGRYGLDFSGHPVAAVGADIKHCQSKGVQVLLSIGGQGGEYSLPSSQSASDVADNLWNAYLGGRRAGVPRPFGDAVVDGIDFFIDQGGADHYEQLARQLHGRGVLLTATVRCAYPDSRMEAALATGVFARIHVRIFGDDQCTMFPKDAWEKWAAAYPRCTVFLTVVASPEQDEGYMFQKDLYYGVQQFIDKEPNYGGIAIWDRYYDKKANYSGEG

SEQ ID NO: 311 - DNA, 915 bp, Oryza sativa
atggtggcgctcggacgccgttcatggctggtcccgctggccatggtgctcgccgtctccagctgcctcgccggcccggcgatggccgccggaaagaccgggcagatgaccgtgttctggggccgtaacaagaacgagggaaccctcaaggagacctgcgacaccggcctctacaccaccgtcgtcatctccttctacagcgtgttcggccacggccgctactggggcgacctctccggccacgacctccgcgtcatcggcgccgacatcaagcactgccagtccaagaacatcttcgtcttcctctccatcggcggcgccggcaaggactactccctcccgacctccaagtccgccgccgacgtcgccgacaacatctggaacgcccacatggacggccgccgccccggcgtgttccgccccttcggcgacgccgccgtcgacggcatcgacttcttcatcgaccagggcgcgcccgaccactacgacgacctcgcccgcaacctctacgcctacaacaagatgtaccgcgcccggacgccggtgaggttgacggcgacggtgcgctgcgcgttcccggacccgaggatgaagaaggcgctggacaccaagctgttcgagcgcatccacgtccgcttctacgacgacgccacctgctcctacaaccacgcggggctcgccggcgtcatggcgcagtggaacaagtggacggcgaggtaccccggcagccacgtctacctgggcctcgcggcggcgaacgtgccggggaagaacgacaacgtgttcatcaagcagctctactacgatctgcttcccaatgtgcagaaggcgaagaactatggcggaatcatgctctgggacaggttctacgacaagcagaccggttacggcaaaaccgtcaagtactgggcttaa

SEQ ID NO: 312 - protein, 304 aa, Oryza sativa
MVALGRRSWLVPLAMVLAVSSCLAGPAMAAGKTGQMTVFWGRNKNEGTLKETCDTGLYTTVVISFYSVFGHGRYWGDLSGHDLRVIGADIKHCQSKNIFVFLSIGGAGKDYSLPTSKSAADVADNIWNAHMDGRRPGVFRPFGDAAVDGIDFFIDQGAPDHYDDLARNLYAYNKMYRARTPVRLTATVRCAFPDPRMKKALDTKLFERIHVRFYDDATCSYNHAGLAGVMAQWNKWTARYPGSHVYLGLAAANVPGKNDNVFIKQLYYDLLPNVQKAKNYGGIMLWDRFYDKQTGYGKTVKYWA

SEQ ID NO: 313 - DNA, 903 bp, Oryza sativa
atggcgtcgtcgtcacaacggcgccgtgcattgccgctctcatttgttgttatagtgctcctcatcctcgccggccccgggccggtcgccggcgacaagaccggcgagctcaccgtcttctggggccggaacaaggacgagggctctctccgggaggcctgcgacaccggcatctacaacaccgtcatcatctccttcctcaccgtcttcggccacggccgctactgggccgacctctccggccaccccgtcgccggcgtcggcgccgacatcaagcactgccagcacgccaagaacgtcaccgtgctcctctccatcggcggcgacggcgaccagtactccctcccgacgcccaggtcggccaaggacgtcgccgaccacctctggcacgcctacctcggcggcggccgccatggcgtgttccgccccttcggcgacgccgtggtcgacggcatcgacctctacatcgaccacggcgggtcggccaactacgacgagctggccaagcgcctcggcgaacacggcggcgtgctgctgacggcgacggtgcggtgcatggacgggcaggagacgagcggcgaggcggcggtggcgacgggtctgatcgggcggatccacgtgcggttctacgacgacaggaggtgctcgtacgactcgtcggagcggcggccgttctacggggcgtggctggggtggacggcgaggtacgcgaacgcgagcgtccacgtcgggctgccggcggcgtgggacgcggcgagcgacgggtggatcaacccggcggcgctggtgttcgacgcgctgcctctggtgcgggggacgcccaactacggcggcgtcgtgctctggaaccgacacttcgacaggaggagccgctacggtcagaccatcaaaggcatgctctga

SEQ ID NO: 314 - protein, 300 aa, Oryza sativa
MASSSQRRRALPLSFVVIVLLILAGPGPVAGDKTGELTVFWGRNKDEGSLREACDTGIYNTVIISFLTVFGHGRYWADLSGHPVAGVGADIKHCQHAKNVTVLLSIGGDGDQYSLPTPRSAKDVADHLWHAYLGGGRHGVFRPFGDAVVDGIDLYIDHGGSANYDELAKRLGEHGGVLLTATVRCMDGQETSGEAAVATGLIGRIHVRFYDDRRCSYDSSERRPFYGAWLGWTARYANASVHVGLPAAWDAASDGWINPAALVFDALPLVRGTPNYGGVVLWNRHFDRRSRYGQTIKGML

SEQ ID NO: 315 - DNA, 909 bp, Oryza sativa
atgtcgaagctccaactccggccgcctctgttggctactctgcattgcagcttgctcgtgctcctcatcatcaatggcgccgccgctgccggcaagaccggcgagctcaccgtcatctggggccggaacaaggacgagggctcattgcgttcgacctgcgacaccggcctctacaccaccgtcgtcatctccttcctcaccgtcttcggccacggccgctaccggaccgacctcgccggccacccgctcgccggcgtcggcgccgacgtcaagcactgccaaaaggccaagaacgtcaccgtcctcctctccatcggcggcgccggcgaccagtactcgctgcccaccgccaagtcggcgcaggacgtggccgaacacctgtggcacgcctacctcggcggcggccgcaggggcgtgtcccgcccgttcggcgacgccgtgctcgacggcgtcgacgtctacgtcgaccgcggccggtggggccactacgacgagctcgccaggcgcctgaggagcttcggtcgcgagaagccggcagtgcgcctgacggcgtcgccggcgtgctcgctggcgctgttcgacgacgaggtggagacgatgaagacgctgtcgctgttcgagcggctgcacgtgcggttctacaacgagagctcgtgcgactacaactacttcgagacgcggccgttctggggcgcgtggaggacgtggacgtcgaggttcccggcggcgcgggtgcaggtggggtggccggcgatggaggagatgagcgggttcgtggacccgcagacgctgcgggagagcgtgctatcgtcggtgcaggacgatgccaactacggcggcgtcatgctctgggatcgctactacgacaagatcaccggattcggccgtgccatcaaagacattgtctaa

SEQ ID NO: 316 - protein, 302 aa, Oryza sativa
MSKLQLRPPLLATLHCSLLVLLIINGAAAAGKTGELTVIWGRNKDEGSLRSTCDTGLYTTVVISFLTVFGHGRYRTDLAGHPLAGVGADVKHCQKAKNVTVLLSIGGAGDQYSLPTAKSAQDVAEHLWHAYLGGGRRGVSRPFGDAVLDGVDVYVDRGRWGHYDELARRLRSFGREKPAVRLTASPACSLALFDDEVETMKTLSLFERLHVRFYNESSCDYNYFETRPFWGAWRTWTSRFPAARVQVGWPAMEEMSGFVDPQTLRESVLSSVQDDANYGGVMLWDRYYDKITGFGRAIKDIV

SEQ ID NO: 317 - DNA, 513 bp, Oryza sativa
atggaagtggccaccaatacggcgacacgatcgccggtgaagctaatgctggtgctgacactgtcgccggcgagcaaggtgatcgccaagggcggcggcggcgtgaagcgggtgcacctcgacggcggcgcgttccagtgccggacatgcgggcggcggttctccacgttccaggctctcggcggccaccggaccagccacaagcggccgcgggtgcgcgccgacggccttgacctcctcctcggcgcgcgccccggcaagctcggcgccggcggcgcctcgacgccggtagtgcaccggtgcgacatgtgcggcaaggtgttcgccaccggccaggcgctcggcggccacatgcgccgccaccggccgctggtgagtcgtaatggcacaatgtccacgacgtggacggcggcggcggcggcggcggcgacaatgtccggctcctcgtcggaagagcgtgacgacgacgacgacgacgacgtgcacaattataatttcatccactttttgtga

SEQ ID NO: 318 - protein, 170 aa, Oryza sativa
MEVATNTATRSPVKLMLVLTLSPASKVIAKGGGGVKRVHLDGGAFQCRTCGRRFSTFQALGGHRTSHKRPRVRADGLDLLLGARPGKLGAGGASTPVVHRCDMCGKVFATGQALGGHMRRHRPLVSRNGTMSTTWTAAAAAAATMSGSSSEERDDDDDDDVHNYNFIHFL

SEQ ID NO: 319 - DNA, 495 bp, Oryza sativa
atgccgagcagcggcggcgccatgcctgcccttccaccaggcttccgcttccaccccaccgacgaggagctcatcgttcactacctcatgaaccaggccgcctccatcaagtgccccgtgccaatcatcgccgaggtcaacatctacaagtgcaacccatgggaccttcctggtaaggcgctgttcggcgagaacgaatggtacttcttcagcccgagggaccgcaagtaccccaacggcgcacgccccaaccgcgccgccggctcggggtactggaaggccaccggcaccgacaagtccatcttgtcaactccgacgagcgacaacatcggcgtcaagaaggccctagtcttctacaagggcaagccccccaagggcgtcaagaccgactggatcatgcacgagtatcgcctcacaggcacatcagctaacaacaccaccaccacaaagcagcgtagagcatcatccatgaccatgagggtgagattcatttaa

SEQ ID NO: 320 - protein, 164 aa, Oryza sativa
MPSSGGAMPALPPGFRFHPTDEELIVHYLMNQAASIKCPVPIIAEVNIYKCNPWDLPGKALFGENEWYFFSPRDRKYPNGARPNRAAGSGYWKATGTDKSILSTPTSDNIGVKKALVFYKGKPPKGVKTDWIMHEYRLTGTSANNTTTTKQRRASSMTMRVRFI

SEQ ID NO: 321 - DNA, 1557 bp, Oryza sativa
atggcatgtgctgcttcgagtgtaaaaggttctctcaacgttggaggagctaaggcattcagcaataatttgtttcgtgattacttgaaatcttcggtgtcttatcccgtttcagagatttcttctcccatcagagcgcaacatgtagcatatggttcgaatctcattgttaggggttctaagagcagggactttagctcgaagctcgcatcgacaaacggcagctcgaagatttctgaagagagggtaactgtattggtcattggtggaggaggaagggagcatgctctttgttatgccttggagcgctctccatcctgtgatgcagtcttctgtgcccctggtaactctggcattgctcaatctggagatgctacatgtataccggacctggacatatcgaacagcgacgcggtcatctcgttctgtcgcaactggggagtcgggttggttgtagttgggcctgaagcaccccttgttgctggccttgcaaatgagcttgtcaaagctgggatacctacttttggtccttcatcagaggctgcagcgttagaagggtcaaaagacttcatgaagaagttgtgtgataagtaccacattcccaccgcaaagtaccaatctttcacagatccttcagatgctaagaaatatgttgaggagcaaggagcccctattgttgttaaagccgatggattggcagctgggaaaggtgtagttgttgctatgactttggaaaaggcatttgaagcaatagactctatgctggttgaaggttcattcggttctgctgggtcacgggtaatagttgaagaatatttagagggggaggaggtttctttctttgctctagtggatggagaaactgctttgcctcttgaatcagcccaggaccataaaagagttggtgatggcgatgttggtccaaatacaggtggtatgggtgcatactcccctgcaccaatagtgacggaaaaactcaagtgcaaagtgatggagagcatcattgtcccgactgttaaaggtatggcaactgaaggatgcaagttcgtcggtgtgttgtatgctgggatcatgattgagaagaaatcgggactgccaaagcttattgaatacaatgtgcgatttggtgatccagaatgtcaggttctgatgatgcggttacaatccgacctcgcacaggtcttgcttgctgcatgtaggggagaactggggtcagtctcactaacctggtcgcctgaattggcaactgtggttgtgatggcaagtgaaggttaccctggtgtttacaagaaggggacagtaataaaaaatatcgatgaagctgagcaggtctctcctgcagttaagatctttcatgctggaactgccctagatcgagatggaaacttcgtcgcggcaggaggccgtgttcttggtgtaaccgcgaaaggtaaggacattgaggaagcaagggcaaaagcatatgacgctctcgacgttgtcgactggccagaaggatttttcaggcatgacattggttggagagcacagaaatatcggcgcatggttgcacactga

SEQ ID NO: 322 - protein, 518 aa, Oryza sativa
MACAASSVKGSLNVGGAKAFSNNLFRDYLKSSVSYPVSEISSPIRAQHVAYGSNLIVRGSKSRDFSSKLASTNGSSKISEERVTVLVIGGGGREHALCYALERSPSCDAVFCAPGNSGIAQSGDATCIPDLDISNSDAVISFCRNWGVGLVVVGPEAPLVAGLANELVKAGIPTFGPSSEAAALEGSKDFMKKLCDKYHIPTAKYQSFTDPSDAKKYVEEQGAPIVVKADGLAAGKGVVVAMTLEKAFEAIDSMLVEGSFGSAGSRVIVEEYLEGEEVSFFALVDGETALPLESAQDHKRVGDGDVGPNTGGMGAYSPAPIVTEKLKCKVMESIIVPTVKGMATEGCKFVGVLYAGIMIEKKSGLPKLIEYNVRFGDPECQVLMMRLQSDLAQVLLAACRGELGSVSLTWSPELATVVVMASEGYPGVYKKGTVIKNIDEAEQVSPAVKIFHAGTALDRDGNFVAAGGRVLGVTAKGKDIEEARAKAYDALDVVDWPEGFFRHDIGWRAQKYRRMVAH

SEQ ID NO: 323 - DNA, 465 bp, Oryza sativa
atggcctcctactacgaaatcacctctcgtggcgcactcatcaagggcagggagttcaacttctccaacctctacctctaccacatctacaatagctcggaaccgaaccagcagcagatcatagacaacgtttcttccactgccatgggtgggctgaccgtcaacaattggacggtgtacgatggagttgcgagcgatgcgacgcttgttgcccgagggcagggcctgcatacctacgctggcaactggcattgctccttcaccttggttttcgaggatgaaaggtttaacggatccacccttgaggtgaaggggatatttgaagagactcatgactgggctattgttgggggaacaggcgagttcgctatggcatctggtgtcataaagaaaacggtgtatgagcgaacacccgaggggacaatcattgaactcacgatccgtgggttttgccccgatttttaa

SEQ ID NO: 324 - protein, 154 aa, Oryza sativa
MASYYEITSRGALIKGREFNFSNLYLYHIYNSSEPNQQQIIDNVSSTAMGGLTVNNWTVYDGVASDATLVARGQGLHTYAGNWHCSFTLVFEDERFNGSTLEVKGIFEETHDWAIVGGTGEFAMASGVIKKTVYERTPEGTIIELTIRGFCPDF

SEQ ID NO: 325 - DNA, 1401 bp, Oryza sativa
gagtacggcgaccaccgcttccgccgcagcgacttcttcctcgccgtcgaggcctacctcagccacgcctgcgcccgccgcgcccgcaggctcaaggccgacctcggcagggacgccaggagcgtccaggtctccgtcgacgaccaccaggaggtcaccgactccttccgcggcgccacgctctggtggtacccttcctccatgtccaacaagtccagcgtcatcagcttctaccccggcgaggatgagcgccgcctctaccgcctcgtcttccaccgccgccaccgcgacctcgtcctcgacggctacctcccccacgtcctcgccgagggccgcgccgtcaccgtccgcaaccgccagcgccgcctcttcaccaacaacgccagcaccagctggaacccctaccgccgcgggaagggcgtctggagccacgtgcccttcgagcacccggccagcttcgacacgctcgccatggaccccggcgacaaggacgccatcgtcgtcgacctcgtggcgttccgcgacggcaaggactactacgccaaggtgggcaagccatggaagcgcggatatctgctctacggcccgcccggcaccggcaagtccaccatgatcgccgccatggccaacttcctcgactacgacgtctatgacctcgagctcacggccgtcaagaacaacaccgagctgcgcaagctctacatcgagaccaccggcaagtccatcatcgtcatcgaggacatcgactgctccatcgacctcaccggcaagcgcaagaagtcctccggcgacaacaaggcgtccgacggcggcggcgagggcagcgacgacaaacccaagctgccgaccgaggcggacaaggacgacggcggcagcaaggtgacgctgtcggggctgctcaacttcatcgacgggctgtggtcggcgtgcggcggcgagcggatcatcatcttcacgacgaaccacaaggagaagctggacccggcgctgatccggcgggggaggatggacgtccacatcgagatgtcctactgcggcttcgaggcgttcaaagtgctggccagcaactacctcggcgtggagcagcacgagctgctaggcgacatacggcggctgctcgaggaggccgacatgtcgccggcggacgtcgccgagaacctgatgcccatgtccaagaggaagaagagggaccctgacgcgtgcctggcaggtctagtcgaggcgctgaacatggccaaggaggaagcacaagcaaacaaggcggcgaaagaggacgaggaggcaaaggcagcgaaagggatagaagagatgaaaaccaaagagcaggcaacgaccaacggtgaagacgaagggaaggacaaaaggacatcggaagagaacaaggccaacggcgacatatag

SEQ ID NO: 326 - protein, 466 aa, Oryza sativa
EYGDHRFRRSDFFLAVEAYLSHACARRARRLKADLGRDARSVQVSVDDHQEVTDSFRGATLWWYPSSMSNKSSVISFYPGEDERRLYRLVFHRRHRDLVLDGYLPHVLAEGRAVTVRNRQRRLFTNNASTSWNPYRRGKGVWSHVPFEHPASFDTLAMDPGDKDAIVVDLVAFRDGKDYYAKVGKPWKRGYLLYGPPGTGKSTMIAAMANFLDYDVYDLELTAVKNNTELRKLYIETTGKSIIVIEDIDCSIDLTGKRKKSSGDNKASDGGGEGSDDKPKLPTEADKDDGGSKVTLSGLLNFIDGLWSACGGERIIIFTTNHKEKLDPALIRRGRMDVHIEMSYCGFEAFKVLASNYLGVEQHELLGDIRRLLEEADMSPADVAENLMPMSKRKKRDPDACLAGLVEALNMAKEEAQANKAAKEDEEAKAAKGIEEMKTKEQATTNGEDEGKDKRTSEENKANGDI

SEQ ID NO: 327 - DNA, 3093 bp, Oryza sativa
atggttgcaacaacagctattgtgggtgctaccacgggggtgatgaagcccctcctgtccaagctcaccaagctgctgggcgaagagtatgccaagctcaaaggcgtgcgcaagcagatcaagttcttgatagatgagttgagcaccatgagtgctgcactcgagatgctcgcggattcggaccagcagctcaacccagaaatgagggattggagggacaagctacgcgagctggcctatgacctggaagattgcatcgatgattttatgtctcgtgttgaccatgatggggaaaagatgggcttcaggaaattcttccgtaagttgaagaaactgaaggcgcgccatgagattgccaatgagatcgaagagctcaagatccgtgcgatcgaggcaagcgaaaggcacaagaggtataattttgaccaattagcacacaactctagcacttttggcattgatcctaggctgtcggcgttctatgaggaggttgataaacttgtgggcattgatggtcctaagaagcgtatcattgagctgctagctatggagatgaaagggtctctaaaagtggtctctattgttggttgtggaggtcttggtaagactactcttacaaaccaagtttatgacacaattcgaagccaattttcttgtgcagcttttgtgtcagtttcacaaaggcctgatataaagaagattctaaacgatattgctgaaggagtagggatctcttctcgtactccggttggtaatgatgaaaagaaactcattaatatactccgagagcatctcaagaataaaagataccttgttgtgattgatgatttatgggatgcaaaagcatggaaaactatcgagcttgcattattaaacagtaactgtggcagcagagtaatcacgacaacacgaagcgttgcagtcgcatcatgctgctcttctcaagatggttatatttatgagatgaagcctcttagtttcgatgactccaaatggttatttttgaaaagagcatttggttatgaaaaatcacattatcctcatctggaagatgttctggataagatactaggaaaatgtggtggcctaccattggcaatcattactatatctagcttgttatcatatcagcatgctattgatgaatggcatagggtacttaatgatattggttatggacttgcaagggatccttatgcagagacaatgtcaaatatattatcgctgagtttcttcaatctccctcaccatctaaaaacttgcttcatgtacctaagtgtatttccagaagattataatattgacaaacgacgtttggttagtaaatggattgctgaaggattcattcaggatgaacaagggcgaagtgcatatagaactggtgagttgtattttaatgagctcatcaatagaagcctgattgaacctgttgatgtaaagtatggtcaggcaaaggcatgtcgagttcatgacatcattcttgactacatcaaatgcaaggctactgaagagaactttgtcacctcattaggatctacagtgcctggatgcactacagagtataaggttcggaggctgtcagtcatcaacagcaatgaagaagatgtcaacataccgacaagcctagatctgtctcaagtacgatcacttactatatttggaaatcgcatgcaaacttctgtatttgatttcaagtttcttcgtgtgttggacctagtatatagggacagaatgggtgacctttttgcaaatattgaaaaattgtttcatctgaagtacatgtgtatctcctcatatggagtggattatctcccagaaaaaattggagaactgaaatatttagaaacgctggacataagacaaaccaatgtggagatattgccatcaactatcacaaaccttcaacgactagctcgtctatttatcaatcaggacacgagattttcagatgaaacgactattggacaattgaagagcctggaagagctaaaagaatttgtagtgtctcagtctgaacaagtgacggccctccaggaagtcagtaagctaaccaagctaaggacattaaaattaacactgcagtcaccattgtcacttgatgattaccatagttgtgtgggaacattattgcaatctttatgcaacctttatgatttgtgcatcatggaccaatcttatgaaaattattgtcttacgttggattcatggcacattgcttctccttgtagccttcgtaagcttgtaatcaaactagtactcaccaaggtgccaaattggatgggtgtgcttggaaatattggagtactagttctaggtatcctgtgtatagcaccagatgatattgagatacttggagcaatacccagcttgctttttctcgagctacaaacttacggaggcaccaatggaaggatcatcatccatggaaacaacagattcataagtttgaaatatttctccttggttattcatgcttgtgggactgcattggagtttgaagcaggatcaatgccaaaggttgagcacctcaagcttcagtttcatctgcatgaattggaatgcctgaatggttcttctgactcaggcatccaacacctctctgctctcggcaaggttgaggtcaaaattatatgcaaaccctcttatgtcattgaattgaatggtttgaactatgatctgatggaacaaaagagtgattgcatcgtcagatgtgtagcaagaaccattaaaactgctgttgagacactccccaaccatcccactatcagtttcaaaacatatcatgtcgaggaatgtgaacattttgaaacaaaaattgaagagaagcagacagcgcaagcacagcgggaccgtcatctaggaatcttatgtatggcaccagaagatattgagatccttggagcaatacccagcttggtttttctcaaactagaaactctcggaggcaccaatggaaggatcatcatccatggaaacaacagattcataagtttgaaatatttctccttggctatcggtgcctgtgggactgcactggagtttgaagaaggatcaatgccaaagaaaatgaagacatggacagtgacggagtga

SEQ ID NO: 328 - protein, 1030 aa, Oryza sativa
MVATTAIVGATTGVMKPLLSKLTKLLGEEYAKLKGVRKQIKFLIDELSTMSAALEMLADSDQQLNPEMRDWRDKLRELAYDLEDCIDDFMSRVDHDGEKMGFRKFFRKLKKLKARHEIANEIEELKIRAIEASERHKRYNFDQLAHNSSTFGIDPRLSAFYEEVDKLVGIDGPKKRIIELLAMEMKGSLKVVSIVGCGGLGKTTLTNQVYDTIRSQFSCAAFVSVSQRPDIKKILNDIAEGVGISSRTPVGNDEKKLINILREHLKNKRYLVVIDDLWDAKAWKTIELALLNSNCGSRVITTTRSVAVASCCSSQDGYIYEMKPLSFDDSKWLFLKRAFGYEKSHYPHLEDVLDKILGKCGGLPLAIITISSLLSYQHAIDEWHRVLNDIGYGLARDPYAETMSNILSLSFFNLPHHLKTCFMYLSVFPEDYNIDKRRLVSKWIAEGFIQDEQGRSAYRTGELYFNELINRSLIEPVDVKYGQAKACRVHDIILDYIKCKATEENFVTSLGSTVPGCTTEYKVRRLSVINSNEEDVNIPTSLDLSQVRSLTIFGNRMQTSVFDFKFLRVLDLVYRDRMGDLFANIEKLFHLKYMCISSYGVDYLPEKIGELKYLETLDIRQTNVEILPSTITNLQRLARLFINQDTRFSDETTIGQLKSLEELKEFVVSQSEQVTALQEVSKLTKLRTLKLTLQSPLSLDDYHSCVGTLLQSLCNLYDLCIMDQSYENYCLTLDSWHIASPCSLRKLVIKLVLTKVPNWMGVLGNIGVLVLGILCIAPDDIEILGAIPSLLFLELQTYGGTNGRIIIHGNNRFISLKYFSLVIHACGTALEFEAGSMPKVEHLKLQFHLHELECLNGSSDSGIQHLSALGKVEVKIICKPSYVIELNGLNYDLMEQKSDCIVRCVARTIKTAVETLPNHPTISFKTYHVEECEHFETKIEEKQTAQAQRDRHLGILCMAPEDIEILGAIPSLVFLKLETLGGTNGRIIIHGNNRFISLKYFSLAIGACGTALEFEEGSMPKKMKTWTVTE

SEQ ID NO: 329 - DNA, 369 bp, Oryza sativa
tctagtacctcatccaatgttgagatcaatgatttttattcggaattaaaggtgttgcaagtgagtttatcagattcttcgatgtccgcacctgggattctgaagttttttatggatgcggatttctataaaaatgtttcagttgcctatcgaattctcttaaccgtacatgtgacggtagcttcagctgaaagaagtttctcaaaattaaagttgttgaagaactatttgagatcaactaagtcgcaagaaaggttaaatggcttgactatgtgcttaatcaagaaggatatcttggacactattgatcttaataccgttcttgatgattttgcatcaagaaatgcccgaagaagtatcttttcatag

SEQ ID NO: 330 - protein, 122 aa, Oryza sativa
SSTSSNVEINDFYSELKVLQVSLSDSSMSAPGILKFFMDADFYKNVSVAYRILLTVHVTVASAERSFSKLKLLKNYLRSTKSQERLNGLTMCLIKKDILDTIDLNTVLDDFASRNARRSIFS

SEQ ID NO: 331 - DNA, 1002 bp, Oryza sativa
atgtcgatgatgagcttcttgagcatggtggaggcggagctgccgccggggttcaggttccacccgagggacgacgagctcatctgcgactacctggcgcccaaggtcgccggcaaggtcggcttctccggccgccgcccgcccatggtcgacgtcgacctcaacaaggtcgagccatgggacctccccgaggtggcgtcggtgggcggaaaggagtggtacttcttcagcctgagggaccgaaaatacgcgacggggcagcgtacgaaccgagccacggtttcggggtactggaaggccacggggaaggacagggtggtggcacgaagaggggcacttgtggggatgaggaagacactggtgttctaccaggggagggcacccaagggaaggaagacagagtgggtgatgcatgagtacaggatggagggtgtgcatgatcaacaagcttccagcttctcctccaaggaagactgggtcctgtgcagagtcatctgcaagaggaaatcaggagggggtgcaacctccaagtcaagaagcctcaccaccaccaccaccaccattgtccatgacacatccacaccaacctcctcaccaccattgccacccctcatggacaccaccctagctcagctccaggcctccatgaacacctcctcctcctccgccatcgccgccgtcgccgcacttgagcaagtgccctgcttctccagcttcagcaacagcattgccagtaacaacaacaacagcaacagtgctactgtcaatgcacagcaatgctacctgccaattgtcacaggtagcaacaacaatggcatgagctacctggatcatggcctgcctgaatttggcagcttcttggacacccagagctgtgacaagaagatgctcaaggcagtgctgagccagctcaactccattgggggtgaggtgttgccaggcctgcctcctccatctgaaatggctgctgctgtcagctcttcttggatgaatcacttctag

SEQ ID NO: 332 - protein, 333 aa, Oryza sativa
MSMMSFLSMVEAELPPGFRFHPRDDELICDYLAPKVAGKVGFSGRRPPMVDVDLNKVEPWDLPEVASVGGKEWYFFSLRDRKYATGQRTNRATVSGYWKATGKDRVVARRGALVGMRKTLVFYQGRAPKGRKTEWVMHEYRMEGVHDQQASSFSSKEDWVLCRVICKRKSGGGATSKSRSLTTTTTTIVHDTSTPTSSPPLPPLMDTTLAQLQASMNTSSSSAIAAVAALEQVPCFSSFSNSIASNNNNSNSATVNAQQCYLPIVTGSNNNGMSYLDHGLPEFGSFLDTQSCDKKMLKAVLSQLNSIGGEVLPGLPPPSEMAAAVSSSWMNHF

SEQ ID NO: 333 - DNA, 684 bp, Allium cepa
atgaccaatcaagctccccttctccctcctggctttcgcttccaccctaccgacgaagaactcattctcttctacctcaaaaatcgagcagaggccactccctgtcccgtctctataatcgctgaagtcgatatttacaaattcgacccttggaatcttccagataaagctatgttcggagacaaagagtggtacttcttcacaccaagagataggaagtatcccaacggagtcagaccaaaccgggcagcgggttccgggtattggaaggctaccggaactgataagcccatcgtgaccaccatcggaaatgagaacatcggtgtgaagaaagctttggtgttttacataggaaaacctccaaaaggtgtgaagactaactggatcatgcatgaatatcgcctttctgaaagcaatataaagagcagcaacaatattgctagatccacaaggatcagaaattcttccatgaggttggatgactgggtgctatgtagaatttatcagaagggaggtcatctgaaagaagactcggtcgagaatgaaagttcatttgaagataacaagctcgagattcaaagatcgttttctttgtcggagcttctgaacgaagcagactttttcgctgttgtcgagatttatagaaactccggtggatacagggaatgtctggtgcaaacatga

SEQ ID NO: 334 - protein, 227 aa, Allium cepa
MTNQAPLLPPGFRFHPTDEELILFYLKNRAEATPCPVSIIAEVDIYKFDPWNLPDKAMFGDKEWYFFTPRDRKYPNGVRPNRAAGSGYWKATGTDKPIVTTIGNENIGVKKALVFYIGKPPKGVKTNWIMHEYRLSESNIKSSNNIARSTRIRNSSMRLDDWVLCRIYQKGGHLKEDSVENESSFEDNKLEIQRSFSLSELLNEADFFAVVEIYRNSGGYRECLVQT

SEQ ID NO: 335 - DNA, 1734 bp, Oryza sativa
aaaaatttcaatccttcctcttccttagcttattagcttccttccttcactagtgccagttttcctcctacctaatctaactagccaggtcgtcatcttcttccttcagctcacgctgaccaaacaccatctgttattctgtttgtttgtttttttaaaaaaagaaaaaaaatctagctaggcgagccgattgaaggagctgagcatgccgagcagcggcggcgccatgcctgcccttccccaggcttccgcttccaccccaccgacgaggagctcatcgttcactacctcatgaaccaggccgcctccgtcaagtgcccgtgccaatcatcgccgaggtcaacatctacaagtgcaacccatgggaccttcctggtaaggctttgttcggcgagaacgatggtacttcttcagcccgagggaccgcaagtaccccaacggcgctcgccccaaccgcgccgccggctcggggtactggaagccaccggcaccgacaagtccatcctctccactccgaccagcgacaacatcggcgtcaagaaggccctcgtcttctacaaggcaagcctcccaagggcgtcaagaccgactggatcatgcacgagtaccgtctcaccggcacatcagctaacagcaccacaccacaaagcagcgtagagcgtcatccatgaccatgaggctggacgactgggtgctgtgcagaatccacaagaagagcaagacttcaattcctctgaccaacacgaccaagaacccgaggaatcaaccgtcgaacagcttgaagacatccatgacaacaatcctctgaacaacctccagctccagctgacatgaacaaccaacagtcagatttccagcccatgacggcgatgagcatgagaagtcatgctccctcaccgatctcctcaacaccatcgactgcgccgcgctctcgcagtttctcctcgacggctcatccgagccatcgctgagcctcctgctcctcccagccccctaatatacacaacacctcatccaaattaccaaacactaaactataaattaacagcaacagcagcatgccacacgccttcgagtcacgcctagatcatcacgatggttacgttaacaattataatgtaatggcctgaggaggaagagaatgatggcgtgtagtgcaacttcctttgatgatggcagcagcagcaatgactttgtgcagccgttgtcaagaaaccgcagctgctgccaagtgattcgaggggtagtggttttggaggaggttactgcaaccagcagcttcagagactgcgactggctttcagtttcagaacggcaatctgctgagccatccatttcctctgaacaatcatctgcagatcagtagtaggcgtctagatcccgtttaccgatcgatctgaagagaggtgaattaatttcaacgaatgaaactacagattcgagaggaagatactgattgttccatttgtgatttattttgaggagttgcatgggcagatagacaaacagacggaattcttatgtaaccgatgcaaggaaagattcagatttcttcctatggcattaatttgtgagtttttttttgttttcattttcatgtcaagaatgtaaattataaatggtaatatcgtgcaagctagtactcaagccaatttatatgataatctttatgcatgtttctaattattctggtatcaagcacacgaaagaaacatgctactttgtcgttgattc

SEQ ID NO: 336 - protein, 387 aa, Oryza sativa
MPSSGGAMPALPPGFRFHPTDEELIVHYLMNQAASVKCPVPIIAEVNIYKCNPWDLPGKALFGENEWYFFSPRDRKYPNGRPNRAAGSGYWKATGTDKSILSTPTSDNIGVKKALVFYKGKPPKGVKTDWIMHEYRLTGTSANSTTTTKQRRASSMTMRLDWVLCRIHKKSNDFNSSDQHDQEPEESTVEQLEDIHDNNSSEQPPAPADMNNQQSDFQPMTAMSMSKSCSLTDLLNTIDCALSQFLLDGSSDAIAEPPAPPSPLIYTTPHPNYQTLNYNINSNSSMPHAFESRLDHHDGYVNNYNVNGLRRKRMMACSATFDDGSSSNDFVHAVVKKPQLLPSDSRGSGFGGGYCNQQLSETATGFQFQNGNLLSHPFPLNNHLQMQ

SEQ ID NO: 337 - DNA, 1428 bp, Zea mays
atgccgagaagcggcggcggcggcaatggcggtggcattagtagtagtagtagggtgatgcccaacctcccggccgggttccgcttccaccccacggacgaggagctcatggtgcactacctcatgaggcaggccgcctccatgccgtgccccgtccccatcatcgccgaggtcaacatctaccagtgcaacccctgggatctccctgccaaggcattgttcggcgacaaggagtggtttttcttcagcccccgggaccgcaagtaccccaacggcgcccgccccaaccgcgccgccgggtccgggtactggaaggccaccggcaccgacaaggccatcctgtcgtcgtccacgcccacgagccacggcggcgccaacatcgtcgtcggcgtcaagaaggcgctcgtcttctacggcggcaggccgcccaagggcaccaagacggactggatcatgcacgagtaccgcctctcgggcgcggcggacgacgactgcaagggcagcaccaggcgcagagtgtcttcctcctcgtcgtcctccatgaggctggacgactgggtgctgtgcaggatccacaagaagagcaacgatttccagttgtcgtcgtcgtcggagcatgagcacgagcaggaggagccggcggcgggcggctcagcgacgactgtggaggaactagacgctctcgtcgtcgtcgacaacagcagcagcagcgacaccaccaccaccaccatcaccaccaacgacaacaactctactgaaacagctgcgactcatcacgatcctcagacgatgatgatgctgagcaagtcgtgctcgctcaccgacctcctcgacagcatcgactacgcggcgctctcctcgcagatgctcctcctcgacgcgccccacccccacgctgatgacccgccgccacacatggtctactacccaccggcggcgtcggcgacgcaccagcaagcaataatagctaataacaccaacagtaatgacgactactatgacgacgacaacttgttgccgactgctgctgctactgcggtagacgcggcggcggcggcggtgctactcagctcgtcgcctgcagacaccaacggtgtgaacaagaggaagcgagtgacggccgtggactactacggcgccgctgaaccgccgaccttcttccaccaccacctcgatgatggcggcaacagcttcttcagtacgaccaagaagctcaagccgccgccgccaagtgattcgaggcatggcggccatttcggcaccgccacagcgagcagctaccgcgacagccagcagctcgtggacagcgcgagcagcagcggcgtcttcttccatcagtatgggtacggctacagcagcagcaacccgttcttgaacttgaaccagcagcagcagctgctactcaacagccacatcgggatgcagtag

SEQ ID NO: 338 - protein, 475 aa, Zea mays
MPRSGGGGNGGGISSSSRVMPNLPAGFRFHPTDEELMVHYLMRQAASMPCPVPIIAEVNIYQCNPWDLPAKALFGDKEWFFFSPRDRKYPNGARPNRAAGSGYWKATGTDKAILSSSTPTSHGGANIVVGVKKALVFYGGRPPKGTKTDWIMHEYRLSGAADDDCKGSTRRRVSSSSSSSMRLDDWVLCRIHKKSNDFQLSSSSEHEHEQEEPAAGGSATTVEELDALVVVDNSSSSDTTTTTITTNDNNSTETAATHHDPQTMMMLSKSCSLTDLLDSIDYAALSSQMLLLDAPHPHADDPPPHMVYYPPAASATHQQAIIANNTNSNDDYYDDDNLLPTAAATAVDAAAAAVLLSSSPADTNGVNKRKRVTAVDYYGAAEPPTFFHHHLDDGGNSFFSTTKKLKPPPPSDSRHGGHFGTATASSYRDSQQLVDSASSSGVFFHQYGYGYSSSNPFLNLNQQQQLLLNSHIGMQ

SEQ ID NO: 339 - DNA, 1215 bp, Oryza sativa
atggttctgtcgaacccggcgatgctgccgccggggttccggttccacccgacggacgaggagctgatcgtgcactacctccgcaaccgggccgcctcctcgccgtgccccgtctccatcatcgccgacgtcgacatctacaagttcgatccgtgggacctcccatccaaggagaattacggggacagggagtggtacttcttcagcccgagggaccgcaagtacccgaacgggatccggccgaaccgcgccgcgggctccggctactggaaggccaccggcaccgacaagcccatccacagcagcggcggcgcggcgaccaacgagagcgtcggcgtcaagaaggcgctcgtcttctacaagggccgcccgcccaagggcaccaagaccaactggatcatgcacgagtaccgcctcgccgccgcagacgcccacgccgccaacacctaccgccccatgaagttccgcaacacctccatgaggctggatgactgggtgctgtgccggatctacaagaagagcagccacgcgtcgccgctggccgtgccgccgctctccgaccacgagcaggacgagccgtgcgccctggaggagaacgcgccgctgtacgcgccgtcgtcgtcgagcgccgcatccatgatcttgcagggcgctgccgccggcgccttcccgtcgctgcacgccgccgccgccgctacgcagaggacggcgatgcagaagatcccttccatttccgacctgctcaacgagtactcgctgtcgcagctcttcgacgacggcggcgccgccgccgccgcccccctgcaggagatggcgaggcagcccgaccaccaccaccaccaacaacaacaacacgccctctttggccaccccgtcatgaaccatttcatcgcgaacaacagcatggttcagctcgcgcacctggacccgtcctcctctgcggccgcctcgacgtcggcaggcgccgtcgtcgagccgccggccgtcaccgggaagcgcaagagatcatcggacggaggcgagccgacgatccaggcgctgcctcctgctgccgcggcggccaagaagccgaacggttcatgcgttggtgcaactttccaaataggcagcgccttgcagggatcgtcactgggactgagccaccagatgctgctccactctaacatggggatgaacctagatctggatctagaactccgtttgggtttcgcttaa

SEQ ID NO: 340 - protein, 404 aa, Oryza sativa
MVLSNPAMLPPGFRFHPTDEELIVHYLRNRAASSPCPVSIIADVDIYKFDPWDLPSKENYGDREWYFFSPRDRKYPNGIRPNRAAGSGYWKATGTDKPIHSSGGAATNESVGVKKALVFYKGRPPKGTKTNWIMHEYRLAAADAHAANTYRPMKFRNTSMRLDDWVLCRIYKKSSHASPLAVPPLSDHEQDEPCALEENAPLYAPSSSSAASMILQGAAAGAFPSLHAAAAATQRTAMQKIPSISDLLNEYSLSQLFDDGGAAAAAPLQEMARQPDHHHHQQQQHALFGHPVMNHFIANNSMVQLAHLDPSSSAAASTSAGAVVEPPAVTGKRKRSSDGGEPTIQALPPAAAAAKKPNGSCVGATFQIGSALQGSSLGLSHQMLLHSNMGMNLDLDLELRLGFA

SEQ ID NO: 341 - DNA, 1179 bp, Oryza sativa
atggttctgtcgaacccggcgatgctgccgccggggttccggttccacccgacggacgaggagctgatcgtgcactacctccgcaaccgggccgcctcctcgccgtgccccgtctccatcatcgccgacgtcgacatctacaagttcgatccgtgggacctcccatccaaggagaattacggggacagggagtggtacttcttcagcccgagggaccgcaagtacccgaacgggatccggccgaaccgcgccgcgggctccggctactggaaggccaccggcaccgacaagcccatccacagcagcggcggcgcggcgaccaacgagagcgtcggcgtcaagaaggcgctcgtcttctacaagggccgcccgcccaagggcaccaagaccaactggatcatgcacgagtaccgcctcgccgccgcagacgcccacgccgccaacacctaccgccccatgaagttccgcaacacctccatgaggctggatgactgggtgctgtgccggatctacaagaagagcagccacgcgtcgccgctggccgtgccgccgctctccgaccacgagcaggacgagccgtgcgccctggaggagaacgcgccgctgtacgcgccgtcgtcgtcgagcgccgcatccatgatcttgcagggcgctgccgccggcgccttcccgtcgctgcacgccgccgccgccgctacgcagaggacggcgatgcagaagatcccttccatttccgacctgctcaacgagtactcgctgtcgcagctcttcgacgacggcggcgccgccgccgccgcccccctgcaggagatggcgaggcagcccgaccaccaccaccaccaacaacaacaacacgccctctttggccaccccgtcatgaaccatttcatcgcgaacaacagcatggttcagctcgcgcacctggacccgtcctcctctgcggccgcctcgacgtcggcaggcgccgtcgtcgagccgccggccgtcaccgggaagcgcaagagatcatcggacggaggcgagccgacgatccaggcgctgcctcctgctgccgcggcggccaagaagccgaacggttcatgcgttggtgcaactttccaaataggcagcgccttgcagggatcgtcactgggactgagccaccagatgctgctccactctaacatggggatgaactga

SEQ ID NO: 342 - protein, 392 aa, Oryza sativa
MVLSNPAMLPPGFRFHPTDEELIVHYLRNRAASSPCPVSIIADVDIYKFDPWDLPSKENYGDREWYFFSPRDRKYPNGIRPNRAAGSGYWKATGTDKPIHSSGGAATNESVGVKKALVFYKGRPPKGTKTNWIMHEYRLAAADAHAANTYRPMKFRNTSMRLDDWVLCRIYKKSSHASPLAVPPLSDHEQDEPCALEENAPLYAPSSSSAASMILQGAAAGAFPSLHAAAAATQRTAMQKIPSISDLLNEYSLSQLFDDGGAAAAAPLQEMARQPDHHHHQQQQHALFGHPVMNHFIANNSMVQLAHLDPSSSAAASTSAGAVVEPPAVTGKRKRSSDGGEPTIQALPPAAAAAKKPNGSCVGATFQIGSALQGSSLGLSHQMLLHSNMGMN

SEQ ID NO: 343 - DNA, 626 bp, Zea mays
atgacgatggcagctacgacgacgatgatgtcagcagcagcgcggggggagacgtcgcatctgccgccggggttccggttccccccgacggacgaggagctcatcctgcactacctccgcaaccgcgccgcgtcggcgccgtgccccgtgcccatcatcgccgacgtcgacatctacaagttcgacccatgggacctgccggccagggcgctgtacggcgacggagagtactacttcttcagcccgcgggaccgcaagtaccccaacggtatccgccccaaccgcgccgccggctccggctagtggaaggccaccggcaccgacaagcccatccacgacgccgccaccggagagggcgtcggcgtcaagaaggcgctcgtcttctacaggggccgcccgcccaggggctccaagaccaactggatcatgcacgagtaccgcctcgccgccgtcgccgggtgcaccagccccctcgccgcctaccgcccgccctccaagttcaggaacgtctccatgaggctggacgactgggtgctgtgccggatctacaaaaagtccggccacgcgtcgccaagggtgccgccgctcgccgactacgagcacctcgaccgcgacggaccttctcc

SEQ ID NO: 344 - protein, 208 aa, Zea mays
MTMAATTTMMSAAARGETSHLPPGFRFPPTDEELILHYLRNRAASAPCPVPIIADVDIYKFDPWDLPARALYGDGEYYFFSPRDRKYPNGIRPNRAAGSGWKATGTDKPIHDAATGEGVGVKKALVFYRGRPPRGSKTNWIMHEYRLAAVAGCTSPLAAYRPPSKFRNVSMRLDDWVLCRIYKKSGHASPRVPPLADYEHLDRDGPSP

SEQ ID NO: 345 - DNA, 1080 bp, Arabidopsis thaliana
atgataagcaaggatccaagatcgagtttacctccagggtttcgatttcatccaacagatgaagaactcattctccattacctaaggaagaaagtttcctcttccccagtcccgctttcgattatcgccgatgtcgatatctacaaatccgatccatgggatttaccagctaaggctccatttggggagaaagagtggtattttttcagtccgagggataggaaatatccaaacggagcaagaccaaacagagcagctgcgtctggatattggaaagcaaccggaacagataaattgattgcggtaccaaatggtgaagggtttcatgaaaacattggtataaaaaaagctcttgtgttttatagaggaaagcctccaaaaggtgttaaaaccaattggatcatgcatgaatatcgtcttgccgattcattatctcccaaaagaattaactcttctaggagcggtggtagcgaagttaataataattttggagataggaattctaaagaatattcgatgagactggatgattgggttctttgccggatttacaagaaatcacacgcttcattgtcatcacctgatgttgctttggtcacaagcaatcaagagcatgaggaaaatgacaacgaaccattcgtagaccgcggaacctttttgccaaatttgcaaaatgatcaaccccttaaacgccagaagtcttcttgttcgttctcaaacttactagacgctacagatttgacgtttctcgcaaattttctaaacgaaaccccggaaaatcgttctgaatcagatttttctttcatgattggcaatttctctaatcctgacatttacggaaaccattacttggatcagaagttaccgcagttgagctctcccacttcagagacaagcggcatcggaagcaaaagagagagagtggattttgcggaagaaacgataaacgcttcgaagaagatgatgaacacatatagttacaataatagtatagatcaaatggatcatagtatgatgcaacaacctagtttcctgaaccaggaactcatgatgagttctcaccttcaatatcaaggctag

SEQ ID NO: 346 - protein, 359 aa, Arabidopsis thaliana
MISKDPRSSLPPGFRFHPTDEELILHYLRKKVSSSPVPLSIIADVDIYKSDPWDLPAKAPFGEKEWYFFSPRDRKYPNGARPNRAAASGYWKATGTDKLIAVPNGEGFHENIGIKKALVFYRGKPPKGVKTNWIMHEYRLADSLSPKRINSSRSGGSEVNNNFGDRNSKEYSMRLDDWVLCRIYKKSHASLSSPDVALVTSNQEHEENDNEPFVDRGTFLPNLQNDQPLKRQKSSCSFSNLLDATDLTFLANFLNETPENRSESDFSFMIGNFSNPDIYGNHYLDQKLPQLSSPTSETSGIGSKRERVDFAEETINASKKMMNTYSYNNSIDQMDHSMMQQPSFLNQELMMSSHLQYQG

SEQ ID NO: 347 - DNA, 1032 bp, Arabidopsis thaliana
atgataagcaaggatccaagatcgagtttacctccagggtttcgatttcatccaacagatgaagaactcattctccattacctaaggaagaaagtttcctcttccccagtcccgctttcgattatcgccgatgtcgatatctacaaatccgatccatgggatttaccagctaaggctccatttggggagaaagagtggtattttttcagtccgagggataggaaatatccaaacggagcaagaccaaacagagcagctgcgtctggatattggaaagcaaccggaacagataaattgattgcggtaccaaatggtgaagggtttcatgaaaacattggtataaaaaaagctcttgtgttttatagaggaaagcctccaaaaggtgttaaaaccaattggatcatgcatgaatatcgtcttgccgattcattatctcccaaaagaattaactcttctaggagcggtggtagcgaactggatgattgggttctttgccggatttacaagaaatcacacgcttcattgtcatcacctgatgttgctttggtcacaagcaatcaagagcatgaggaaaatgacaacgaaccattcgtagaccgcggaacctttttgccaaatttgcaaaatgatcaaccccttaaacgccagaagtcttcttgttcgttctcaaacttactagacgctacagatttgacgtttctcgcaaattttctaaacgaaaccccggaaaatcgttctgaatcagatttttctttcatgattggcaatttctctaatcctgacatttacggaaaccattacttggatcagaagttaccgcagttgagctctcccacttcagagacaagcggcatcggaagcaaaagagagagagtggattttgcggaagaaacgataaacgcttcgaagaagatgatgaacacatatagttacaataatagtatagatcaaatggatcatagtatgatgcaacaacctagtttcctgaaccaggaactcatgatgagttctcaccttcaatatcaaggctag

SEQ ID NO: 348 - protein, 343 aa, Arabidopsis thaliana
MISKDPRSSLPPGFRFHPTDEELILHYLRKKVSSSPVPLSIIADVDIYKSDPWDLPAKAPFGEKEWYFFSPRDRKYPNGARPNRAAASGYWKATGTDKLIAVPNGEGFHENIGIKKALVFYRGKPPKGVKTNWIMHEYRLADSLSPKRINSSRSGGSELDDWVLCRIYKKSHASLSSPDVALVTSNQEHEENDNEPFVDRGTFLPNLQNDQPLKRQKSSCSFSNLLDATDLTFLANFLNETPENRSESDFSFMIGNFSNPDIYGNHYLDQKLPQLSSPTSETSGIGSKRERVDFAEETINASKKMMNTYSYNNSIDQMDHSMMQQPSFLNQELMMSSHLQYQG

SEQ ID NO: 349 - DNA, 1056 bp, Glycine max
atgggaaacccagaatccaatttgccacccggttttaggttccacccaaccgatgaggagctcattcttcactaccttagtaaaaaggtagcatccatacccttgaccgtttccattattgctgaggttgatatctacaagttagatccatgggacttaccagctaaggccacctttggggagaaagaatggtatttcttcagtcctagagaccgaaagtacccaaatggtgcaaggccaaacagggcagctgcttcagggtattggaaggccactggcactgataagaccatagtgacatcattgcaaggaggagcacaagagagcgttggtgtgaagaaggctttggtgttttacaaaggaagacccccaaagggtgtcaagaccaattggatcatgcatgaatatcgccttgtagacaacaacaaacccatcaagctcaaagactcctccatgagattggatgattgggttctttgccggatttacaagaagtccaaacatgctctaacttcaacagaggcatcaataggggtgggtgaggtagatcaagcagaggagcacttattccaagagacccttttgccaatctcaaaatctccagcacctccacctcaaaacacattgatatctcagaaatctgtgtccttctccaacttgttggatgccatggactactctatcctaagtagtttcttatctgaaaatcataccaaccacccaccaggggttggatcaagtactggattcaacactgggaatttggatcagcaatgctctccaatcgacaacagcaatggttacatgtttcagaagaacaacccccaattgaacccttcagtctccaacatggaaaacatgatgaggccaaagcgccaagtttcaaacatggatgaggaaaccttgtacccatcaaagaaataccttagttcctcttgcaacttccctactaacatcaacaaccaatacgagaacccacaatggaactacctcatgaagcagtctttgctgaatcaacggttaatgcttggtcctcatcttcaatttcaaggataa

SEQ ID NO: 350 - protein, 351 aa, Glycine max
MGNPESNLPPGFRFHPTDEELILHYLSKKVASIPLTVSIIAEVDIYKLDPWDLPAKATFGEKEWYFFSPRDRKYPNGARPNRAAASGYWKATGTDKTIVTSLQGGAQESVGVKKALVFYKGRPPKGVKTNWIMHEYRLVDNNKPIKLKDSSMRLDDWVLCRIYKKSKHALTSTEASIGVGEVDQAEEHLFQETLLPISKSPAPPPQNTLISQKSVSFSNLLDAMDYSILSSFLSENHTNHPPGVGSSTGFNTGNLDQQCSPIDNSNGYMFQKNNPQLNPSVSNMENMMRPKRQVSNMDEETLYPSKKYLSSSCNFPTNINNQYENPQWNYLMKQSLLNQRLMLGPHLQFQG

SEQ ID NO: 351 - DNA, 1023 bp, Medicago truncatula
atgggaaccccacagaccaatttgccaccaggttttaggttccaccctactgatgcagaactcattcttcactaccttaggaaaaaaattgcctccattcccttgcctgtttccatcattgctgaagttgatatttataagttggatccttgggatttaccagctaaggcttcatttggtgagaaagaatggtacttttttagtcctagagatagaaagtacccaaacggtgcaaggccaaacagggcagctgcttcagggtattggaaagccactggcactgataagaccatagtggcatcattgccatgtggaggaggaagatcacaagagaacattattggtgtcaaaaaggctcttgttttttacaaaggaaaacccccaaagggtattaagactaattggatcatgcatgaatatcgtcttgttgacaacaataaacctattaagctcaaagattcttccatgaggttggatgattgggtgctatgccgaatttacaagaaatcaaaatgtgcactaacttcaacagaatcatcagaaactatggtaggtgaagtggaacatgcagaagagacacaattccaagaaaccctatttccaatcaccaaaaacacaacctcacctcttcaaaacacactcatgtctcaaaaatcagtgtccttttcaaacctattagatgctatggactactccatgttaagcagcttcttatctgaaaattccaacaacccatcaggaattggaacaagttcaggtttcaacactgaaaattttaaccaacaacaatcttcccatatcaacacttgcaacaattacatgtctcagaagaatcctcaatccaacactttaaagcaccagctttcaaacgtagatgaagacatgttatacccatcaaagaagtacttgagttcctcttgcaattttcctaacatcaattctcagtatgaaaactaccttatgaagcaatctttgatgaatcaacaattgcttttaggtcctcatcatcaatatcaaggctaa

SEQ ID NO: 352 - protein, 340 aa, Medicago truncatula
MGTPQTNLPPGFRFHPTDAELILHYLRKKIASIPLPVSIIAEVDIYKLDPWDLPAKASFGEKEWYFFSPRDRKYPNGARPNRAAASGYWKATGTDKTIVASLPCGGGRSQENIIGVKKALVFYKGKPPKGIKTNWIMHEYRLVDNNKPIKLKDSSMRLDDWVLCRIYKKSKCALTSTESSETMVGEVEHAEETQFQETLFPITKNTTSPLQNTLMSQKSVSFSNLLDAMDYSMLSSFLSENSNNPSGIGTSSGFNTENFNQQQSSHINTCNNYMSQKNPQSNTLKHQLSNVDEDMLYPSKKYLSSSCNFPNINSQYENYLMKQSLMNQQLLLGPHHQYQG

SEQ ID NO: 353 - DNA, 1107 bp, Populus trichocarpa
atgaagaacccacaatcaagcttgcccccagggtttaggttccacccgacagatgaggagctcatcctccattaccttaagaagaagttggcatccacaccgtttcctgtgtctatcatagcagatgttgacatctataagtttgatccgtgggacttgccagctaaagcttccttgggggagaaagagtggtactttttcagtcctagagatcgcaagtaccccaatggagcaaggcctaacagagcagctgcatctggatattggaaggcaactgggacagacaaaatcataatggcatcaacaatggcaccaggaggtgtagttggagggcaagagaacattggagttaaaaaggctcttgttttctacaagggaaagcctccaaagggtgtcaagactaattggatcatgcatgagtatcgcctagcagataaccccgcctgcaacaacaacaagaaatccatgaagccaaaagattcatccatgaggttagatgattgggttctttgccggatttacaagaaatcccatgccttgacttcatctccaagggcattaatatccagtgaacatgaccaagaagaagaagaagaagaacaacaacaacaacaatttgtccaagaaacccttttacccataagcaacaagaataatctcatgtcccagaaatcttgttctttctccaacttgttcgatgccatggactactccatgtggagtagtttcctggcagataccccattcaatccaacagggtttgagtcaaatcctacattgaatagtactgcaacacagttggaccaacctttcttcagtaacagcaactctgcaagcaacagtaacagcacgagcagcggttcctttcttcagaagttacctcagttgaacacttcaatgccaaacatgcaggagaataaactcaagcgccagcttccacacattgacgaggacttgctgcacccatcaaaaaagttcatgaactcttgcagtttcactaacaccaacaataatactcaaactgatatgggtcaatacaatttcgtaagccagccattcttggaccagcaattgcttttgagcccacatcttcaatttctaggttaa

SEQ ID NO: 354 - protein, 368 aa, Populus trichocarpa
MKNPQSSLPPGFRFHPTDEELILHYLKKKLASTPFPVSIIADVDIYKFDPWDLPAKASLGEKEWYFFSPRDRKYPNGARPNRAAASGYWKATGTDKIIMASTMAPGGVVGGQENIGVKKALVFYKGKPPKGVKTNWIMHEYRLADNPACNNNKKSMKPKDSSMRLDDWVLCRIYKKSHALTSSPRALISSEHDQEEEEEEQQQQQFVQETLLPISNKNNLMSQKSCSFSNLFDAMDYSMWSSFLADTPFNPTGFESNPTLNSTATQLDQPFFSNSNSASNSNSTSSGSFLQKLPQLNTSMPNMQENKLKRQLPHIDEDLLHPSKKFMNSCSFTNTNNNTQTDMGQYNFVSQPFLDQQLLLSPHLQFLG

SEQ ID NO: 355 - DNA, 1104 bp, Populus trichocarpa
atgaagaaccaacaatcaagcttgccaccagggtttaggttccaccccacagacgaggagctcatcctccattaccttaggaagaaggtagcatccacaccctttcctgtgtctatcattgcagatgttgatatctacaagtttgatccatgggacttgccagccaaagctgccttgggagagaaagagtggtactttttcagtcccagagatcgtaagtaccccaatggagctaggcctaacagagctgctgcctctggatattggaaggcgacgggaacagacaaggtcataatggcgtcaacaatcacgcctggaggtgtaattatacaaggacaagagaacgttggtgtaaaaaaggctcttgtcttctacaagggaaagcctccgaagggagtcaagactgactggattatgcatgagtatcgcctagcagatacctccagctacagctacaacaaacccatgaagccaagagattcatccatgaggttggatgactgggttctttgccggatttacaagaaagcccatgctttaacttcatgtgcgagagcagaaatgtccagtgaacatgagcaggaagaagaagaggaacattttgtcccagaaaaccctttaccaagcttgaaaggtcccataagcaacaagagcgcgctcatgtcccagaaatcttgctccttctccaacttattagatgccatggactattccctattgagcagtttactagcagatacccagttcaacccaacagggtttgagtcaaatcctgcactgaatagcactgcttcccaactggaccagcctcctttcttcagtaacagcaatattgcaggcggcgggggcgggggctgctttcttcaaaagttacctcagttgagcgcctcagcgcccaacaacgtggacaacaaactcaagcgccagctttcacacattgatgaggacatgctgcatccatcaaagaagttcatgaactcttgcagtttcactaacaccaacaacattagtacccaaactgataatggtcaatacaacttcctaagccagccattcttgaaccagcaattccttctgagcccacatcttcaatttcaaggttaa

SEQ ID NO: 356 - protein, 367 aa, Populus trichocarpa
MKNQQSSLPPGFRFHPTDEELILHYLRKKVASTPFPVSIIADVDIYKFDPWDLPAKAALGEKEWYFFSPRDRKYPNGARPNRAAASGYWKATGTDKVIMASTITPGGVIIQGQENVGVKKALVFYKGKPPKGVKTDWIMHEYRLADTSSYSYNKPMKPRDSSMRLDDWVLCRIYKKAHALTSCARAEMSSEHEQEEEEEHFVPENPLPSLKGPISNKSALMSQKSCSFSNLLDAMDYSLLSSLLADTQFNPTGFESNPALNSTASQLDQPPFFSNSNIAGGGGGGCFLQKLPQLSASAPNNVDNKLKRQLSHIDEDMLHPSKKFMNSCSFTNTNNISTQTDNGQYNFLSQPFLNQQFLLSPHLQFQG

SEQ ID NO: 357 - DNA, 807 bp, Arabidopsis thaliana
atggaagtaacttcccaatctaccctccctccagggttcagatttcatcctaccgacgaagaactcatcgtttactatcttcgaaaccagaccatgtctaaaccatgccctgtctccatcatcccagaagttgatatctacaaattcgacccatggcaattacccgagaaaacagagtttggagaaaatgagtggtatttcttcagccctagagaaagaaaatatccaaacggagtcagaccaaaccgggcagctgtttccggttattggaaagcaaccggtacagacaaagccattcacagcggttcaagtaacgtaggtgtcaagaaagctctagtcttctacaaaggtagacctcctaaaggaatcaaaactgactggatcatgcatgagtatcgtctccatgattcacgtaaagcatcaacgaaacgtaacggttccatgaggttagatgaatgggtactgtgtaggatatacaagaagagaggagcaagtaagcttctgaatgagcaagagggtttcatggacgaagtactaatggaggatgagacaaaagttgtagttaacgaagcagagagaagaactgaagaagagataatgatgatgacgtcgatgaaacttccaaggacgtgttcgctggctcatttgttggaaatggattacatgggacccgtctctcacattgataattttagtcagttcgatcatcttcatcaacctgattcggagtctagttggttcggggaccttcagtttaaccaagacgagatcttaaaccatcatcgtcaagcgatgtttaagttttag

SEQ ID NO: 358 - protein, 268 aa, Arabidopsis thaliana
MEVTSQSTLPPGFRFHPTDEELIVYYLRNQTMSKPCPVSIIPEVDIYKFDPWQLPEKTEFGENEWYFFSPRERKYPNGVRPNRAAVSGYWKATGTDKAIHSGSSNVGVKKALVFYKGRPPKGIKTDWIMHEYRLHDSRKASTKRNGSMRLDEWVLCRIYKKRGASKLLNEQEGFMDEVLMEDETKVVVNEAERRTEEEIMMMTSMKLPRTCSLAHLLEMDYMGPVSHIDNFSQFDHLHQPDSESSWFGDLQFNQDEILNHHRQAMFKF

SEQ ID NO: 359 - DNA, 702 bp, Glycine max
atggaaggtagcacaacaagctctgaactccctcctggctttaggtttcacccaacggacgaggaactgattgtgtattacctttgtaaccaagccacctcaaagccatgccctgcatctatcatcccagaagtggatctctataagtttgatccttgggaattgccagataaaacagaatttggagaaaatgaatggtatttctttagtccaagagacaggaagtacccaaatggggtgaggcctaaccgagcaactgtgtctgggtattggaaggctactggcacagacaaggcaatctatagtggatctaagaatgttggggtgaagaaatctttagtcttttacaagggtaggccaccaaagggtgccaagactgattggatcatgcatgagtatcgattggctgaatcaaaaataccagctagcaggaaaattgggtccatgaggctggatgactgggtcttgtgcaggatctataagaagaagagcatggtaaaagcattggagcacaaagaggcacacccagaagtccaaattgctaatctggcgcctgcaaatcatgatgttgaacagaaaatgatgaaccttcctaggacttggtcccttacttaccttttggatatgaattacttgggtccaattttatctgatggctcttattgctcaaccttggattttcaaattaacaatggggattag

SEQ ID NO: 360 - protein, 233 aa, Glycine max
MEGSTTSSELPPGFRFHPTDEELIVYYLCNQATSKPCPASIIPEVDLYKFDPWELPDKTEFGENEWYFFSPRDRKYPNGVRPNRATVSGYWKATGTDKAIYSGSKNVGVKKSLVFYKGRPPKGAKTDWIMHEYRLAESKIPASRKIGSMRLDDWVLCRIYKKKSMVKALEHKEAHPEVQIANLAPANHDVEQKMMNLPRTWSLTYLLDMNYLGPILSDGSYCSTLDFQINNGD

SEQ ID NO: 361 - DNA, 843 bp, Glycine max
atggagggtggcacaacaagctctgaactcccccctggctttaggtttcatccaacggatgaggaactgattgtgtattacctttgtaaccaagccacctcaaagccatgccctgcatctatcatcccagaagtggatctctataagtttgatccatgggaattgccagataaaacagaatttggagaaaatgaatggtatttctttactccaagagacaggaagtacccaaatggggtgaggcctaaccgagcaaccgtgtcagggtattggaaggctactggcacagacaaggcaatctacagtggatctaagcatgtaggggtgaagaaatctttagtcttttacaagggtaggccaccaaagggtgccaagacagattggatcatgcatgagtatcgattggctgaatcaaaaataccatctagcaggaaaattggatccatgaggctggatgactgggtcttgtgcaggatctataagaagaagagcatggtaaaggcattggagcacaaagaggcacagcctaaagtccaaattgctaatcttgcagctgcaaatcaagatgttgaacagaaaatgatgaaccttcctaggacttggtcccttgcttaccttttggatatgaattacttgggtccaattttatctgatggctcttattgcccaaccttagattttcaaattaacaatgccaatattgaatttgacccttttgtgaaatctcaaccggttgaaatgaactacaattatgaagcagattcagggaagtaccaagtgaaacagagtagcaccattgaccaacccatatatgtgaaacaaatgtatgatttgctaggataa

SEQ ID NO: 362 - protein, 280 aa, Glycine max
MEGGTTSSELPPGFRFHPTDEELIVYYLCNQATSKPCPASIIPEVDLYKFDPWELPDKTEFGENEWYFFTPRDRKYPNGVRPNRATVSGYWKATGTDKAIYSGSKHVGVKKSLVFYKGRPPKGAKTDWIMHEYRLAESKIPSSRKIGSMRLDDWVLCRIYKKKSMVKALEHKEAQPKVQIANLAAANQDVEQKMMNLPRTWSLAYLLDMNYLGPILSDGSYCPTLDFQINNANIEFDPFVKSQPVEMNYNYEADSGKYQVKQSSTIDQPIYVKQMYDLLG

SEQ ID NO: 363 - DNA, 816 bp, Medicago truncatula
atggagagtagtgcaagctctgaactccctcctggctttagatttcatccaactgatgaggaactaattgtgcattacctttgtaatcaagctacatcaaagccatgccctgcatctatcataccagaagttgatatctataaatttgatccatgggaattgcctgataaatctgagtttgaggaaaatgaatggtatttctttagcccaagagaaagaaagtatccaaatggggtgaggcctaatagagcaactttgtctggatattggaaagctactggcacagacaaggcaatcaaaagtggatcaaagcaaattggtgtgaagaaatctttggtattttacaaaggtagaccaccaaagggtgtcaaaactgattggattatgcatgagtacagattgattggatcacaaaaacaaactagcaagcatattggatccatgaggctagatgactgggttctatgcaggatctataagaagaagcacatgggaaaaacattgcagcaaaaagaggattattcaacacatcaatttaatgattctataataactaataatgatgatggtgaactagaaatgatgaaccttacaaggagttgttcacttacttatcttttggatatgaattactttggtccaatcttatctgatggttcaactttggattttcaaatcaacaattccaatattggaattgacccctatgtaaaacctcagcctgttgaaatgaccaaccattatgaagcagattcacatagtagcatcaccaatcagccaatatttgtgaaacaaatgcataattatttagcataa

SEQ ID NO: 364 - protein, 271 aa, Medicago truncatula
MESSASSELPPGFRFHPTDEELIVHYLCNQATSKPCPASIIPEVDIYKFDPWELPDKSEFEENEWYFFSPRERKYPNGVRPNRATLSGYWKATGTDKAIKSGSKQIGVKKSLVFYKGRPPKGVKTDWIMHEYRLIGSQKQTSKHIGSMRLDDWVLCRIYKKKHMGKTLQQKEDYSTHQFNDSIITNNDDGELEMMNLTRSCSLTYLLDMNYFGPILSDGSTLDFQINNSNIGIDPYVKPQPVEMTNHYEADSHSSITNQPIFVKQMHNYLA

SEQ ID NO: 365 - DNA, 840 bp, Glycine max
atggagaatagaacaagctctgtactcccacctggcttcaggtttcaccccactgatgaggaactaattgtgtactacctttgcaaccaagcctcatcaaggccatgccctgcatcaatcattccagaagtggatatctataagtttgatccatgggaattacctgataaaacagactttggagaaaaggagtggtacttctttagcccacgagagaggaagtatccaaatggggtgaggcctaatagagcaaccgtgtctgggtattggaaggccactgggacagataaagcaatctatagtgggtctaagcatgtaggggtgaagaaggctttggttttttacaagggtaagccaccaaagggtctcaagacagattggattatgcatgagtatagattaattggatcaagaagacaagccaatagacaagttggatccatgaggctagatgactgggtcttgtgtaggatttacaagaagaagaatattggaaaatcaatggaggcaaaagaggactacccaatagcccaaatcaaccttacaccagcaaacaataacagtgaacaagaattggtgaaatttccaaggactagttcccttactcatcttttggaaatggattacttgggtccaatatcacatatattacctgatgcctcatacaattcaacctttgattttcaaattaacactgccaatggtggaatagacccgttcgtaaaaccacagccggttgaaatcccttatgcaacagattcagggaagtaccaggtgaaacagaatagcaccatcaaccccaccatatttgtgaaccaagtgtatgatcaaagaggataa

SEQ ID NO: 366 - protein, 279 aa, Glycine max
MENRTSSVLPPGFRFHPTDEELIVYYLCNQASSRPCPASIIPEVDIYKFDPWELPDKTDFGEKEWYFFSPRERKYPNGVRPNRATVSGYWKATGTDKAIYSGSKHVGVKKALVFYKGKPPKGLKTDWIMHEYRLIGSRRQANRQVGSMRLDDWVLCRIYKKKNIGKSMEAKEDYPIAQINLTPANNNSEQELVKFPRTSSLTHLLEMDYLGPISHILPDASYNSTFDFQINTANGGIDPFVKPQPVEIPYATDSGKYQVKQNSTINPTIFVNQVYDQRG

SEQ ID NO: 367 - DNA, 783 bp, Medicago truncatula
atggaactcccacctggctttaggtttcatccaactgatgaggagctaattgtgtattatctttgtaatcaagcaacatcacaaccatgtcctgcatctatcattccagaagttgatatctataaatttgatccatgggaattaccagataaatcaggctttggagaaaatgaatggtatttttttactccaagagaaagaaagtatccaaatggggtgagaccaaatagagcaactgtttctggttattggaaagctactggaacagataaatcaatctttagtgggtctaagcatattggagttaagaaagctttggtattttacaagggtagaccaccaaagggaatcaagacagattggattatgcatgaatataggttaattggatcaagaagacaagctaatagacaaattgggtccatgaggctagatgattgggtcttatgtaggatctataagaagaagaacatcacaaaatcattggagacaaatgaagactacccaacaaatcaaatcaacatgacacaaacaaatgatgataatgaacaagaattagtgaaatttccaaggacatgttctcttactaatcttttggatatggattatatgggaccaatatcacaaatattatcagatggatcatataattcaacctttgaatttcaaattaatacagcacatggtggaacaatagaccccacttatgcagctggtttagagaagtacaatgtgaaacaaaatagcagctttgggaaccaagtatttgatcaaagggaataa

SEQ ID NO: 368 - protein, 260 aa, Medicago truncatula
MELPPGFRFHPTDEELIVYYLCNQATSQPCPASIIPEVDIYKFDPWELPDKSGFGENEWYFFTPRERKYPNGVRPNRATVSGYWKATGTDKSIFSGSKHIGVKKALVFYKGRPPKGIKTDWIMHEYRLIGSRRQANRQIGSMRLDDWVLCRIYKKKNITKSLETNEDYPTNQINMTQTNDDNEQELVKFPRTCSLTNLLDMDYMGPISQILSDGSYNSTFEFQINTAHGGTIDPTYAAGLEKYNVKQNSSFGNQVFDQRE

SEQ ID NO: 369 - DNA, 852 bp, Populus trichocarpa
atgcaaggaaaaaccatctataaccagcttcctcctggttttaggttccaccctaccgatgaggaattgatcgtgtactaccttcgtaaccaagccacttccaggccatgccctgcatctattataccagaagttgatatttacaaatttgatccctggcaattacctgagaaggcagaatttggagaaaatgagtggtacttctttacccctcgtgaccgcaagtacccaaatggagtgaggcctaacagagcaaccgtgtcggggtattggaaggccacgggcacagacaaggccatccacagcggatctaaatatgttggtgtcaagaaagctcttgttttttacaagggcaggccaccaaagggtgccaagacagattggattatgcatgagtatcgcttaaatgatccaagaaaacaagccaacaagcaaaatggatccatgagattggatgactgggtcctatgtagaatttacaaaaagaggcacacgataggacatttagaggagaaaacagaaaatacagtagatgcccatttggacgtcaccccagctaatgatgttagtgaacaacaaatgatgaaatttccaagaacatgttctctttctcatctgttagaattggagtacctgggttcaatttcccaactcttgagtggtgacacatacaattcaaatcttgatctccaaaacctcatgagcaatgctggaactgaccacgttgaaaaaatccagctaggacagatgtctctccaacacacagatcgtgggaagtttcaggggaacctgcagggcagtaccttaaaccagccactatttatgaacccaacgatgtatggattccagtga

SEQ ID NO: 370 - protein, 283 aa, Populus trichocarpa
MQGKTIYNQLPPGFRFHPTDEELIVYYLRNQATSRPCPASIIPEVDIYKFDPWQLPEKAEFGENEWYFFTPRDRKYPNGVRPNRATVSGYWKATGTDKAIHSGSKYVGVKKALVFYKGRPPKGAKTDWIMHEYRLNDPRKQANKQNGSMRLDDWVLCRIYKKRHTIGHLEEKTENTVDAHLDVTPANDVSEQQMMKFPRTCSLSHLLELEYLGSISQLLSGDTYNSNLDLQNLMSNAGTDHVEKIQLGQMSLQHTDRGKFQGNLQGSTLNQPLFMNPTMYGFQ

SEQ ID NO: 371 - DNA, 849 bp, Solanum lycorpersicum
atggttggaaaaattagctctgatcttcctcctggatttaggtttcatccaacagatgaggaattaatcatgtactatcttcgatatcaagctacttcaaggccatgccctgtctcaattatccccgaaattgatgtctacaagttcgatccctgggtattacctgaaaaggcagaatttggagacaatgagtggtatttttttacccctagagatagaaaatatccaaatggtgttaggccaaatagagcagctgtgtcaggttattggaaggctactggcactgataaagcaatttatagtgcaaataaatatgttggaattaaaaaagcacttgttttttacaaaggcaaaccaccaaaaggtgtcaagactgattggatcatgcatgaatatcgtttgagtgattcaaagtctcaaacatctaagcaaagtggatctatgaggttagatgattgggtactatgtagaatttataagaagaaaaatttggggagaactatagagatgatgaaagttgaagaagaagaattagaggcacaaaatgtgagtactacaaataatgaaattgaagttgttggtggaccacaaacaatgaaattaccaagaatttgttcattgtcacatctattggaattggattattttggatcaattccacaattactaagtgacaatttattatatgatgaccaaggttacacaatgaataatgtgaataacacaagtaatgtggatcaagtatcatcacaacaacaaaatacaaataatattacaagcaataattgtaatattttcttcaattatcaacaaccactttttgtgaatccaacatttcaatctcagtga

SEQ ID NO: 372 - protein, 282 aa, Solanum lycorpersicum
MVGKISSDLPPGFRFHPTDEELIMYYLRYQATSRPCPVSIIPEIDVYKFDPWVLPEKAEFGDNEWYFFTPRDRKYPNGVRPNRAAVSGYWKATGTDKAIYSANKYVGIKKALVFYKGKPPKGVKTDWIMHEYRLSDSKSQTSKQSGSMRLDDWVLCRIYKKKNLGRTIEMMKVEEEELEAQNVSTTNNEIEVVGGPQTMKLPRICSLSHLLELDYFGSIPQLLSDNLLYDDQGYTMNNVNNTSNVDQVSSQQQNTNNITSNNCNIFFNYQQPLFVNPTFQSQ

SEQ ID NO: 373 - DNA, 828 bp, Solanum lycorpersicum
atggttggtaaaaataattccaatcacctccctcctggatttaggtttcatccaacagatgaggaattaatcatgtattatcttcgaaatcaagctacctccaagccttgtccatcttcaatcatccccgaagttgatgtctataagttcgatccctgggaattgcctgaaaaaactgaatttggagaaaaagaatggtatttcttcaccccacgtgatagaaaatatccaaatggtgttaggccaaatagggcagctgtgtctggttattggaaagccacaggcacagataaaggtatatatagtggaacaaaatatgttggtattaaaaaagctcttgtattttataaaggaaaaccccctaaaggtatcaagactgattggatcatgcatgaatatagattgagtgaatcaaggactcaaccaactaggccaaatggatccatgaggttggatgattgggtactttgtagaatttataagaagaagaatttggaaagagctatagagatgatgaaagttgaagaagacacacaagaacctcaaataatgagtgttactaatcctattcatgaaagtgtggcttctaatggacaacaaacattgaaactaccaaggacttgttcactatctcatttattagaaatggattattttggatcaatttcacaactatttgatgacaataattcatacaatactattagccaaaataatacattaatgaccaatgttaatggatatgttatgcctcatcaagccatggagaaatttcaactaggggaagtgtcacaaatttctatgaatccatcctatcaatttcagtaa

SEQ ID NO: 374 - protein, 275 aa, Solanum lycorpersicum
MVGKNNSNHLPPGFRFHPTDEELIMYYLRNQATSKPCPSSIIPEVDVYKFDPWELPEKTEFGEKEWYFFTPRDRKYPNGVRPNRAAVSGYWKATGTDKGIYSGTKYVGIKKALVFYKGKPPKGIKTDWIMHEYRLSESRTQPTRPNGSMRLDDWVLCRIYKKKNLERAIEMMKVEEDTQEPQIMSVTNPIHESVASNGQQTLKLPRTCSLSHLLEMDYFGSISQLFDDNNSYNTISQNNTLMTNVNGYVMPHQAMEKFQLGEVSQISMNPSYQFQ

SEQ ID NO: 375 - DNA, 987 bp, Medicago truncatula
atggacaaaaatcctcattcagaaattcaactccctcctggatttagattccacccttctgatgaagaactcattgttcactatctaagaaacaaagtgacttcatctcctcttcctgcttcattcatagcagaaataaatctttacaagtacaatccgtgggagcttccaagtaaggctttgtttggtgaggaagaatggtatttctttactccaagggacagaaagtatcccaaaggattgaggcctaatagagcagctggtgtaggttattggaaagcaactggaactgacaaacctattcttacttcatgtgggttgaaaagcattggagtgaagaaagctcttgtgttctataagggacgtccaccaaaaggatctaaaactgagtggatcatgcatgaatataggttgcatgattcgatgatctcaaattccaatcatagtggctctatgagactagatgagtgggtgctatgtcgtgttcgacaaaaaatgggcagcccaagaagcagttgggaagattcaaatgaacttagctatgaatcaactagtcaatttcagcaaatgactgtgaactctaatcctgaaccagtcaaaaactatgtacagaatgaatatccaatgttaccttatattttggcttctaagagtgctcttcctaattccattggtatgacctcagacaatgtaaatatacaagcttcatcttatgatgacgacttaaacgtgataggagcacagttcttatcagctacaactgagggattgtttaataaaccactgaagagaaaagctgtcgaagataatgttgccatggacttttatgatgtcctcaataaaagtttaagcagagaagttgatggtaggaagcaaagtcttgaaaaagatttaagcaaaggatataatttctacagctttgatcagtggacttcaattatacaacctcaagagcttaatagcttaaccttcactggatatacataa

SEQ ID NO: 376 - protein, 328 aa, Medicago truncatula
MDKNPHSEIQLPPGFRFHPSDEELIVHYLRNKVTSSPLPASFIAEINLYKYNPWELPSKALFGEEEWYFFTPRDRKYPKGLRPNRAAGVGYWKATGTDKPILTSCGLKSIGVKKALVFYKGRPPKGSKTEWIMHEYRLHDSMISNSNHSGSMRLDEWVLCRVRQKMGSPRSSWEDSNELSYESTSQFQQMTVNSNPEPVKNYVQNEYPMLPYILASKSALPNSIGMTSDNVNIQASSYDDDLNVIGAQFLSATTEGLFNKPLKRKAVEDNVAMDFYDVLNKSLSREVDGRKQSLEKDLSKGYNFYSFDQWTSIIQPQELNSLTFTGYT

SEQ ID NO: 377 - DNA, 972 bp, Medicago truncatula
atggagggacaacaaaatggatcaaaatcaaattacacttttccacctggtttcagattccatccttctgatgaagaactcatagttcattacttgcaaaacaaaatcaaatcgcgtccacttccagcgtcgattatagctgaaattgatctctataagtataatccatgggagttacctaagaagtctttgtttggtgaggaagaatggtatttctttagtccgagagaccgaaagtatccaaatggattaaggccaaatagaacagcagcttcaggatattggaaggcaactggaactgataagccaataatttcttcatgtgaatcaaagcatataggagtgaagaaagctcttgtgttttattcaggtagacctcctaagggagttaagacagattggatcatgaacgaatatagattggttgacacaacggcgaaatcgtttaaactcaaaggttcgatgcggttggatgactgggtattatgtcgggttcgaaataaaggctattcattgaagaatttatctgaaaatcaagagaatcctagtgaaccaaccataccattaaacttaccaaggggtgaagaacgccctacaaacgtgaaccttcgatctgacattatcacagattatcagttcaaagactatcagattatagcctctattctagttggcggagttatacctccaactgagaacatgtcgagtttgagcgttaatggaagcaaattcaacaatctaaactcagtttctgaagaaggtttcaataaagcgaattctcaaactacaaactattctttggaatgttacttcaatccactgaaaagaaaatctaacgaggatgatgatcagtttgaaaatctcatttcttttaacagcaagttcaactctgagaacaaattatgcgaatctcctagcatcgattttcaaaagctaaacaaatttacctttacagaaagatatcagcaatga

SEQ ID NO: 378 - protein, 323 aa, Medicago truncatula
MEGQQNGSKSNYTFPPGFRFHPSDEELIVHYLQNKIKSRPLPASIIAEIDLYKYNPWELPKKSLFGEEEWYFFSPRDRKYPNGLRPNRTAASGYWKATGTDKPIISSCESKHIGVKKALVFYSGRPPKGVKTDWIMNEYRLVDTTAKSFKLKGSMRLDDWVLCRVRNKGYSLKNLSENQENPSEPTIPLNLPRGEERPTNVNLRSDIITDYQFKDYQIIASILVGGVIPPTENMSSLSVNGSKFNNLNSVSEEGFNKANSQTTNYSLECYFNPLKRKSNEDDDQFENLISFNSKFNSENKLCESPSIDFQKLNKFTFTERYQQ

SEQ ID NO: 379 - protein, 6 aa, Artificial sequence
  Motif I
  VARIANT (1)..(1): / replace = "Pro" / replace = "Ser"  / replace = "Asn" / replace = "Val" / replace = "Thr"
  VARIANT (2)..(2): / replace = "Val" / replace = "Leu" / replace = "Ile" / replace = "Ala" / replace = "Ser"
  VARIANT (3)..(3): / replace = "Pro" / replace = "Ser" / replace = "Asp" / replace = "Val" / replace = "Gln"
  VARIANT (4)..(4): / replace = "Val" / replace = "Ile" / replace = "Phe"
  VARIANT (6)..(6): / replace = "Thr" / replace = "Gly" / replace = "Pro"
ATTDIA

SEQ ID NO: 380 - protein, 6 aa, Artificial sequence
  Motif II
  VARIANT (1)..(1): / replace = "Asn" / replace = "Lys"
  VARIANT (2)..(2): / replace = "Gly" / replace = "Ser"
  VARIANT (3)..(3): / replace = "Arg" / replace = "Ser" / replace = "Gln" / replace = "Ala" / replace = "Val" / replace = "Leu"
  VARIANT (4)..(4): / replace = "Gln"
  VARIANT (5)..(5): / replace = "Pro"
  VARIANT (6)..(6): / replace = "Ser" / replace = "Arg"
REIRAN

SEQ ID NO: 381 - protein, 7 aa, Artificial sequence
  Motif III
  VARIANT (1)..(1): / replace = "Tyr"
  VARIANT (2)..(2): / replace = "Lys"
  VARIANT (3)..(3): / replace = "Ile" / replace = "Val"
  VARIANT (4)..(4): / replace = "Tyr" / replace = "His" / replace = "Phe" / replace = "Arg"
  VARIANT (5)..(5): / replace = "Lys" / replace = "Gln"
  VARIANT (7)..(7): / replace = "Lys" / replace = "Asn" / replace = "Cys" / replace = "Ser" / replace = "Thr" / replace = "Gly" / replace = "Met" / replace = "Ala" / replace = "Arg"
CRLSNKD

SEQ ID NO: 382 - DNA, 2194 bp, Oryza sativa; identical to SEQ ID NO: 26

SEQ ID NO: 383 - DNA, 1264 bp, Oryza sativa
tcgacgctactcaagtggtgggaggccaccgcatgttccaacgaagcgccaaagaaagccttgcagactctaatgctattagtcgcctaggatatttggaatgaaaggaaccgcagagtttttcagcaccaagagcttccggtggctagtctgatagccaaaattaaggaggatgccaaaacatgggtcttggcgggcgcgaaacaccttgataggtggcttaccttttaacatgttcgggccaaaggccttgagacggtaaagttttctatttgcgcttgcgcatgtacaattttattcctctattcaatgaaattggtggctcactggttcattaaaaaaaaaagaatctagcctgttcgggaagaagaggattttgttcgtgagagagagagagagagagagagagagagagagagagaaggaggaggaggattttcaggcttcgcattgcccaacctctgcttctgttggcccaagaagaatcccaggcgcccatgggctggcagtttaccacggacctacctagcctaccttagctatctaagcgggccgacctagtagccacgtgcctagtgtagattaaagttgccgggccagcaggaagccacgctgcaatggcatcttcccctgtccttcgcgtacgtgaaaacaaacccaggtaagcttagaatcttcttgcccgttggactgggacacccaccaatcccaccatgccccgatattcctccggtctcggttcatgtgatgtcctctcttgtgtgatcacggagcaagcattcttaaacggcaaaagaaaatcaccaacttgctcacgcagtcacgctgcaccgcgcgaagcgacgcccgataggccaagatcgcgagataaaataacaaccaatgatcataaggaaacaagcccgcgatgtgtcgtgtgcagcaatcttggtcatttgcgggatcgagtgcttcacagctaaccaaatattcggccgatgatttaacacattatcagcgtagatgtacgtacgatttgttaattaatctacgagccttgctagggcaggtgttctgccagccaatccagatcgccctcgtatgcacgctcacatgatggcagggcagggttcacatgagctctaacggtcgattaattaatcccggggctcgactataaatacctccctaatcccatgatcaaaaccatctcaagcagcctaatcatctccagctgatcaagagctcttaattagctagctagtgattagctgcgcttgtgatc

SEQ ID NO: 384 - DNA, 20 bp, Artificial sequence
  primer A
atgccgagcagcggcggcgc

SEQ ID NO: 385 - DNA, 20 bp, Artificial sequence
  primer B
ctactgcatctgcagatgat

SEQ ID NO: 386 - DNA, 48 bp, Artificial sequence
  primer 08754
ggggacaagtttgtacaaaaaagcaggcttaaacaatgccgagcagcg

SEQ ID NO: 387 - DNA, 48 bp, Artificial sequence
  primer 08755
ggggaccactttgtacaagaaagctgggtctactgcatctgcagatga

SEQ ID NO: 388 - DNA, 1296 bp, Oryza sativa
ttgattcgagaaatccctcacaacccacaacattttcaaacaacgcaaagcagtagcagcagcgagaagcaagcaagaagcgatggggatggggatgaggagggagagggacgcggaggcggagctgaacctgccgccggggttcaggttccaccccacggacgacgagctggtggagcactacctgtgcaggaaggcggcggggcagcgcctgccggtgccgatcatcgccgaggtggatctctacaagttcgacccgtgggatctgcccgagcgcgcgctgttcggcgccagggagtggtacttcttcaccccgcgggatcgcaagtatcctaatgggtcacgccccaaccgcgccgccggcaacgggtactggaaggccaccggcgccgacaagcccgtcgcgccgcgggggcgcacgcttgggatcaagaaggcgctcgtgttctacgccggcaaggcgccgcgaggggtcaagactgattggatcatgcatgagtaccggctcgccgatgctggccgcgccgccgcgggcgccaagaagggatctctcaggttggatgattgggtgctgtgtcggctgtacaacaagaagaacgagtgggagaagatgcagcaggggaaggaggtgaaggaggaggcgtccgacatggttacgtcgcagtcgcactcgcacacccactcgtggggcgagacgcgcacgccggagtcggagatcgtggacaacgaccccttcccggagctggactcgttcccggcgttccagcctgcgccgccgccggcgacggcgatgatggtgcccaagaaagaatcgatggacgacgccaccgcggccgccgccgccgccgccaccatccccaggaacaacagcagcctgttcgtggacctgagctacgacgatatccagggcatgtacagcggcctcgacatgctgccgccgggcgacgacttctactcgtcgctcttcgcgtcgccgcgggtgaaggggacgacgccacgcgccggcgccggcatgggcatggtcccgttctgaggtgacggcgacgcgatcgaacaggtggtgatcgatgctgcaacgtgtgtaaatatacagcgccggctgggtcaagagatggctcgggtgacgcgcgcgcggcgtgtcctggcgttggcgccggggcattctttagtttttcatcttttcatcatctcagatggtagatacaaaacagtgtatgtatgtagctctgtttctctctatagaaccccaacaaattttgttgttgatgttgtttatcttcatatgctttgatcttg

SEQ ID NO: 389 - protein, 316 aa, Oryza sativa; identical to SEQ ID NO: 30

SEQ ID NO: 390 - DNA, 1529 bp, Oryza sativa
gccaagccctcctctcctcttcccaacactagtaggataaagccacagagagagcagtagtagtagcgagctcgccggagaacggacgatcaccggagaagggggagagagatgagcggcggtcaggacctgcagctgccgccggggttccggttccacccgacggacgaggagctggtgatgcactacctctgccgccgctgcgccggcctccccatcgccgtccccatcatcgccgagatcgacctctacaagttcgatccatggcagcttccccggatggcgctgtacggagagaaggagtggtacttcttctccccgcgagaccgcaagtacccgaacgggtcgcggccgaaccgcgccgccgggtcggggtactggaaggcgaccggcgccgacaagccggtgggctcgccgaagccggtggcgatcaagaaggccctcgtcttctacgccggcaaggcgcccaagggcgagaagaccaactggatcatgcacgagtaccgcctcgccgacgtcgaccgctccgcccgcaagaagaacagcctcaggttggatgattgggtgctgtgccggatttacaacaagaagggcgggctggagaagccgccggccgcggcggtggcggcggcggggatggtgagcagcggcggcggcgtccagaggaagccgatggtgggggtgaacgcggcggtgagctccccgccggagcagaagccggtggtggcggggccggcgttcccggacctggcggcgtactacgaccggccgtcggactcgatgccgcggctgcacgccgactcgagctgctcggagcaggtgctgtcgccggagttcgcgtgcgaggtgcagagccagcccaagatcagcgagtgggagcgcaccttcgccaccgtcgggcccatcaaccccgccgcctccatcctcgaccccgccggctccggcggcctcggcggcctcggcggcggcggcagcgaccccctcctccaggacatcctcatgtactggggcaagccattctagacgaccaaaaaaaaaaaaaaacaaccgcattggcagcaatggtgtcactgaacaccgtgcaggctagctagcttcatggccggtgaactttgactcaggcgagccgccggagttgactcaaagataattaaaagaagtgttttaagtggattggattggattagacagaggagatgaggactcgagaaaggcggcgatgagaccgtggttggggggaccctggcctggactgaacgacgacgaggcagcagcagaaagatggtgcaattgcatcgggtggcatgtcagtgtgtgtgtatagtggcatgtacatagtacatggtgattgattcggtatacagggggctagctttcctgtttctgtttcttcattggttaattattactcccattataaggtcttcttcagggttgctagcttaattaattaattaattagcccagtggttgaagtgtaagtcaaaattcatcaagtcagagactggaataatacaatacagtactgc

SEQ ID NO: 391 - protein, 303 aa, Oryza sativa; identical to SEQ ID NO: 32

SEQ ID NO: 392 - DNA, 1182 bp, Oryza sativa
gcttccaaaactttcgaaagcttccattagcgactaatccagccttcgttaagggtgattagaatttgattaatttcaaggcctcagatcggagattgaatggagtgcggtggtgcgctgcagctgccgccggggttcaggttccacccgacggacgacgagctggtgatgtactacctgtgccgcaagtgcggcggcctccccctcgccgccccggtgatcgccgaggtggacctctacaagttcaacccatgggatctccccgagagggcgatgggaggggagaaggagtggtacttcttctcgccgcgggaccggaagtacccgaacgggcagcggccgaacagggcggcggggacggggtactggaaggcgacgggggcggacaagccggtggggtcgccgcgggcggtggcgatcaagaaggcgctcgtcttctacgccgggaagccgcccaagggcgtcaagaccaactggatcatgcacgagtaccgcctcgccgacgtcgaccgctccgccgccgcccgcaagctctccaagtcctcccacaacgccctcaggttggatgattgggtgttgtgccgaatctacaacaagaagggagtgatcgagaggtacgacacggtggacgccggcgaggacgtgaagccggcggcggcggcggcggcggcgaagggtggtcgcatcggcggcggcggcggcgcggcggcgatgagggtggagctctccgactatgggttctacgaccaggagccggagtcggagatgctgtgcttcgaccggtcggggtcggcggaccgcgactcgatgccgcggctgcacaccgactccagcgggtcggagcacgtgctgtcgccgtcgccgtcgccggacgacttccccggcggcggcgaccacgactacgccgagagccagcccagcggcggatgcggcgggtggcccggcgtcgactgggccgccgtcggcgacgatggcttcgtcatcgacagctccctcttcgagctgccctcgccggcggcgttctcccgcgccgccggcgacggcgccgccttcggcgacatgttcacgtacctgcagaagccgttctaattaacggaacgtgacgcctctgcaaacgctaattagctcactaaccactgtcaggtcgatcgtgtaattcttttaccagtctagggtacagcc

SEQ ID NO: 393 - protein, 329 aa, Oryza sativa
MECGGALQLPPGFRFHPTDDELVMYYLCRKCGGLPLAAPVIAEVDLYKFNPWDLPERAMGGEKEWYFFSPRDRKYPNGQRPNRAAGTGYWKATGADKPVGSPRAVAIKKALVFYAGKPPKGVKTNWIMHEYRLADVDRSAAARKLSKSSHNALRLDDWVLCRIYNKKGVIERYDTVDAGEDVKPAAAAAAAKGGRIGGGGGAAAMRVELSDYGFYDQEPESEMLCFDRSGSADRDSMPRLHTDSSGSEHVLSPSPSPDDFPGGGDHDYAESQPSGGCGGWPGVDWAAVGDDGFVIDSSLFELPSPAAFSRAAGDGAAFGDMFTYLQKPF

SEQ ID NO: 394 - DNA, 1648 bp, Oryza sativa
aatgctccaggctccagtataaatgtcactgacactgagtgagcgagtgagtacactactcatgcatgacactatcctaattagctttagctagctagattgacgaggccgatcgaattagcatacgatcatgatgagtttcccgtacagctccggcgacctcggcgaggccaccaccgccgccgccgccgccgttgacatgatcacgctcgaccagatgttcagagactatgatgcctccaccggcgacgatctcttcgagttggtctgggaaagctgcggcggcggcgagatcgacagcggcgccggagaggtgcagcctgctggtgttccctgctgccgtcgattgctgccgggatcgtcgccggagccgacctccgaggacgagatggcggcgtggctctccacgattgtcaccggctctggcggcggcggcgacgacgtggctgccggcggagaccatcaagatccggcggtgaagaagcccgacggcgagccgttgacggagaagatggataagaagctcccaacaagaacggaagagaggcggcgcgtcaagcacaaagcaagaagaaatcctggatacgcagaaacacacggcttaacagagaagagacgaaggagcaggataaatgagaagttcaagatgcttcagcggctcgttccagggtgcgataagtgtagccaatcctcgacgctggaccggacaatccattacatgaagtcactgcagcagcaacttcaggcaatgtatccgacgatggtgagaccagcagcagtgtaccccgtcgtgcagccaccgccggcgttcgccgccggcggaccgccggcggcgtcacaaggcggcctccaccgccatcgccggctgatggtggtggtctccgtccaccaccggtgccggtgtttccgtttggggcgccagtgattccgttggtgacgatgatgatgcctgcggcggcggcgcctccatggatctatccttcgtcgtccaccggcgatcaccatcttcttcagggctcaagcagtaatggcagcatagctacgatcacgagcagccgtcatcgccggtagccggccggccggccgtcgccggctagagctgccggttagcagggccggccctggcactatgcagccgaggcgaccgtcgggggccatgatgacgggggccataatggtgggggtgccaacacctaatcctagtaatctagtacctcatccaatgttgagatcaatgatttttattcggaattaaaggtgttgcaagtgagtttatcagattcttcgatgtccgcacctgggattctgaagttttttatggatgcggatttctataaaaatgtttcagttgcctatcgaattctcttaaccgtacatgtgacggtagcttcagctgaaagaagtttctcaaaattaaagttgttgaagaactatttgagatcaactaagtcgcaagaaaggttaaatggcttgactatgtgcttaatcaagaaggatatcttggacactattgatcttaataccgttcttgatgattttgcatcaagaaatgcccgaagaagtatcttttcataggaagcaatggatatgatagggttctattctttattaagttaatgaataatgatattagttccaagttacaaat

SEQ ID NO: 395 - protein, 264 aa, Oryza sativa
MMSFPYSSGDLGEATTAAAAAVDMITLDQMFRDYDASTGDDLFELVWESCGGGEIDSGAGEVQPAGVPCCRRLLPGSSPEPTSEDEMAAWLSTIVTGSGGGGDDVAAGGDHQDPAVKKPDGEPLTEKMDKKLPTRTEERRRVKHKARRNPGYAETHGLTEKRRRSRINEKFKMLQRLVPGCDKCSQSSTLDRTIHYMKSLQQQLQAMYPTMVRPAAVYPVVQPPPAFAAGGPPAASQGGLHRHRRLMVVVSVHHRCRCFRLGRQ

SEQ ID NO: 396 - DNA, 1656 bp, Oryza sativa
atgtgtgacaaggatccgggcataaagctcttcgggcgggtgatcccgctggctccagaggctgaggctgctgcggcggcggacggctccgaccagccggaggcggcggcggcggcggcggcggaggttgagccggcggcgcaggatgaggatcatcacaaggaaacagaagaaagaaaatatgatgaaatgaaggttgatgtgccacaagaggaggaagataacgaaatgaaggtcgatgcaccacaagagaaaaaggataatgaagtgacggctgatgtgccagaagagaagggaaatgatgaaatgagggttgatgcatcagagtcaatagaaagcatagagccagtcagcagatctaccttggacaataaaaaagaagatcagggtcagatgaacaacgttgaagagaaagcagcatcagactcaaaagatgaaaatgaaaagacagcaaatgatgaatcaggccaggacaaagtacttaagaagccagataagattctcccttgccctcggtgcaacagtatggacacaaagttttgttattacaacaactacaatgttaatcaacccaggcacttctgtaagaactgccaaaggtattggactgccgggggaaccatgagaaatgtacctgttggtgctgggaggcgcaaaagcaagagctcatcgttgcactaccgtcacttactgatggcccctgattgcatgatggggtctagagtggaaatatccaagtcaatgaaccctgaagctttcgcatctgcgcattcgacccctatacaaccaattggcagaaacgaaacagttctcaaatttgggcctgaggtgccactctgtgaatcgatggcatcagtgctgaacattcaggagcagaatggaaccaatgctgcagcagtaccaacgggtgaaaatcaggaagataactcttgcatctcttcaatcacatcacacaacgtgttacctgaaaatgcagcccaagttgacaagaacagcacgccggtgtattgcaacggagtcggcccagtgccgcagtactaccttggagctccttacatgtacccatggaacataggatggaacaacgttcctatgatggtgccaggtacaagcatgccagagtctgcttcccaatctgagagctgcagcaccagttcagctccatggatgaacatgaactcccccatgatgccggttgcctcgaggctttctgcaccaccatttccataccctctagtgccacctgcactatggggttgcttatccagctggccggccacggcatggaacataccgtggatcagaacgaatggcggctgcatgtctccatcgtcgtcgagcaacagcagctgttcaggcaatggctcccctctggggaagcattccagggactcctctctcccactgaaggaggacaaggaggagaaatcactgtgggttcccaagacgctccgcatcgacgatcccgacgaggcggcgaagagctccatctgggccaccctggggatcaagcctggagaccctggcatcttcaagccgttccagtccaaaggtgagagcaaaggccaagcagcatcagagactcgtcctgctcgtgctcttaaggcaaacccagctgcattgtcgcggtcgcagtcgttccaggagacttcttga

SEQ ID NO: 397 - protein, 551 aa, Oryza sativa
MCDKDPGIKLFGRVIPLAPEAEAAAAADGSDQPEAAAAAAAEVEPAAQDEDHHKETEERKYDEMKVDVPQEEEDNEMKVDAPQEKKDNEVTADVPEEKGNDEMRVDASESIESIEPVSRSTLDNKKEDQGQMNNVEEKAASDSKDENEKTANDESGQDKVLKKPDKILPCPRCNSMDTKFCYYNNYNVNQPRHFCKNCQRYWTAGGTMRNVPVGAGRRKSKSSSLHYRHLLMAPDCMMGSRVEISKSMNPEAFASAHSTPIQPIGRNETVLKFGPEVPLCESMASVLNIQEQNGTNAAAVPTGENQEDNSCISSITSHNVLPENAAQVDKNSTPVYCNGVGPVPQYYLGAPYMYPWNIGWNNVPMMVPGTSMPESASQSESCSTSSAPWMNMNSPMMPVASRLSAPPFPYPLVPPALWGCLSSWPATAWNIPWIRTNGGCMSPSSSSNSSCSGNGSPLGKHSRDSSLPLKEDKEEKSLWVPKTLRIDDPDEAAKSSIWATLGIKPGDPGIFKPFQSKGESKGQAASETRPARALKANPAALSRSQSFQETS

SEQ ID NO: 398 - DNA, 1497 bp, Oryza sativa
atggtggtgttgagtgtggtgaatttgacaccaccaccattatgtgggtccccgcaaatagtgaggtacaaattcagccgtggagattttagccgtgccggtagcaagagctttatgaatcgtgctggagacagaagtgtcgttacagtgcttgattgggctatcaggagcgacggatcgtgctcgtcaacatcgcgggtcgctcctgcctgtgtcagccccaacagctactgcgtcaacaccaccaacggacagggatatctttgcaagtgctccccgggatatgatggcaatccctacgtcaccggtgacaatattaatgaatgcaagcttagaagagaagaccctgccaagtacagtgaactttatccatgttacggtggtagcaaatgccatgacacagagggtgattacaggtgcaaatgccgtttgggacgtagaggggacggcaaaatcgataatggatgtcaacccataattcccccacctgtaattgggattcttgtgatagccggtgttgtgctatttggtttggtccttgtgtgcttacgtaagaaatggaagcttaaagggtgctatgaccgtaatggtggccaaatgctagagaagacgagcgttaaaatctttacaaagcaggaattggacaagataactaacaacaaaagcaacaagatagggaaaggcgccttcggtgtggtctacaagggaacccacgacgatcagccggtcgccgtcaagtactccatcgaaaagagcatatcgcggactcgtggcaaggatgagttcgtgaaggaaatcacggtgcaacttcaagtcagccacgacaacctggtgtgcctcattggttgttgcctcgaggtggaggtccctatgctggtcttcgagttcgtccctaatggtagcctcgagagcgtccttcatggggcagagcggtgcgctctcccgctgctgaaacggctggatattgccattggctctgcgaaagctcttacctacatgcactcgcattcccgccgctgcatttttcatggtgatatcaaacctgccaatattctccttgacgacaaccttatgcctaaagtctccgactttgggtcatcagagtccgtattgaaaaccaagcaccgaagcgtgtgtgccgacatgggctacatagatcctgtgtatatggtaacaggcaattttagactgaagagtgatgtctacagtttcggtatcgtggtcttagagctcatcacccgaaagaaggccgtgtacgatgggaaaagccttccgatagaatttaccaactgttacgaggatgataatgccagaaggaatatgtacgaccaggacatattgtctgcagaggctctacaacctcactgcatggagtgcctcgacagaatggccggcattgctgtccagtgccttgaatacaacatagacaagaggccgactatggcggaggcgctacaggagcttatccaattgagagcaaaggttgcaggaaaatga

SEQ ID NO: 399 - protein, 498 aa, Oryza sativa
MVVLSVVNLTPPPLCGSPQIVRYKFSRGDFSRAGSKSFMNRAGDRSVVTVLDWAIRSDGSCSSTSRVAPACVSPNSYCVNTTNGQGYLCKCSPGYDGNPYVTGDNINECKLRREDPAKYSELYPCYGGSKCHDTEGDYRCKCRLGRRGDGKIDNGCQPIIPPPVIGILVIAGVVLFGLVLVCLRKKWKLKGCYDRNGGQMLEKTSVKIFTKQELDKITNNKSNKIGKGAFGVVYKGTHDDQPVAVKYSIEKSISRTRGKDEFVKEITVQLQVSHDNLVCLIGCCLEVEVPMLVFEFVPNGSLESVLHGAERCALPLLKRLDIAIGSAKALTYMHSHSRRCIFHGDIKPANILLDDNLMPKVSDFGSSESVLKTKHRSVCADMGYIDPVYMVTGNFRLKSDVYSFGIVVLELITRKKAVYDGKSLPIEFTNCYEDDNARRNMYDQDILSAEALQPHCMECLDRMAGIAVQCLEYNIDKRPTMAEALQELIQLRAKVAGK

SEQ ID NO: 400 - DNA, 8133 bp, Oryza sativa
atggctccaagcaaggcatggatgggccttgtggatgatcggctaaatcacgagtacttagagggtgtagagaagttcatagattatgcattcagtaaattagatggtgtccaggttatacgttgcccatgcatcaagtgctgcaatacatattctttgcctcgtcacatagtgtcttctcacctgaaagcgtatggaatactgaggagctacacattttggtaccatcatggtgaagtcttagcagaacaagagaatgacatagaagttgatgagtatgattcacaggaatttaatggggaaggatataatggaatgcaagacctgatggaaaatttatttcctcagtgcaacacccctggtggagacgaagcgacacatgaatctactgatcagggacctgaagaggagccaaacactgatgcggccaagttctatgctttgcttgacaaatacaaccaaccactgtatgaagggtccagaacctctaaattatctgccttagttaatttgcttcatgttaagaatttggggaaatggagtaataagtccttcaccgcattgttggaattgctgcgcaaggactttctacctcatgactctacactgccaaattcttattatgaagcaaaaaaaactattcgtgaactaggactaagttacataaaaattgatgcttgcaagaatgattgcatgctgtactggaaagaagatatagatgctgaatcctgcaaggtatgtggatcatctaggtggaaagaagaaaaacacacaggggaaattaagcactcttcagctgggaagaagattccacataaaactatgcggtactttcctataaaacctagattgcagaggttatttatgtgtaggaaaacggccgcatatgctaagtggcacaaagagtgtagggttgatgatggagttatgcgacatcctgctgattcaaaagcatggaaggagtttgataaaatccattcatcatttgcatctgaacctcggaatgtgaggctttgtcttgctagcgataggtttcagccgtttgctaacatgcgaacctcctattccatctggcctgtattccttgttcctcttaatttgcctccttggatgtgcatgaagcaacaaaatgtaatgttgtcaatgctactaccaggacctgatggtcctggggatgcaatcgatgtttatctgcaaccattgatagaggaactgatagaactttgggaagatggagttgacacatatgattcatcaaccaagacaaatttcaagctacgtgcacagctcttctttggacagtgcatgacttccctgcttatggaaatatatcaggccatagcacaaagggaaagttggcatgtccagtttgtcataaagaaacaaattcaatgtggcttaagaaaggtcggaagttttgctacatgggtcatcggcgctttcttcgcagaagccacagatggagaaatgacagaacttcttttgatggtacaaaagagagccgagaaccaccaaaggagttatccggagatgatgtgctcaagcaatcgttgcgttaatatgaaagagcggaaaatgtcaggattgaagagccatgactgtcatgttattttaaatcgtatactccctcttgctctgcgtggactgctccctgaaaatatttatgaaccacttgtggagctatcccagttctttaagaaattaaattcgaaggcattgtcagttgaacagcttgaagaaatggatgctcaaataccaataattctttgtaagcttgaaaaggaatttccaccatccttctttgatgtcatgatgcatttgcctgttcatttggctagagaagctctaattggtggaccaaccatctatcgatggatgtatttatttgagagacaaattcactgcctaaaatcactagttcagaatatggctcgcccagagggttcaattgctgagggatacattgcagatgagtttatgacattaagctctaggtacttggatgatgtcgagacaaaacacaatcgtccaggaagaatacatgacacatctattggtaacaaatttaatttatcaatcttctcctgtgctggaaggcccattggttctcgtaaaactcgagatcttgatatgcttgaatcagaacaagctcatatttatattctgcggaattgcgatgaagtccaagaatatatcagtgagtactgcaacagtacagagggttcttcaatggtacaatttacctcaacatggaacaaaaaattcatcaactggtttaaagagaagatatatcagcagcaccagcatgataagagtgaggtcatggaagaccttttgtcattgtcgcgtggtccgctgaagaatataacatgctttactggatatgacatgaatgggttcagatatcgcacagaaagacgggacagccgcaggtgtacacaaaacagtggtgtgatggttcttggtgatgatgtggaatattatggagttttgacagaaatacttgagattcagtacttaggtggaaggagggtgccgttatttcgctgcaactgggttgatgtatttaataaagaccgtggaatacggatagataaatatgggcttactagtgttaacctacagcggttgcttcaaacagacgagccatttgttttagctagtcaagctgctcaagtattttttgtgaaagacaatcagatcaaaggttggcacttgattgagaaaatgcaaccacgtgacacttaccaagttgttgtgatgatttctggaaggtatggaagaaatagagtgtctgcactacaaaacaacaactcgaagttcattagtcctggactacttcagcaacaagttgcaagacggacagcaccttcaacagctgatgatttatttgggtcaccagagaacatggtgtcagctacagctattgtgcaagaaggaaagagcaagcctgtctatgtaaggcagagcaatctaaagtaccagaaacacactgctgtgccacaacctggagaggaggatgattcagacgaagagtcaatagacacatggcttcggagagctagggaatataacaattccaaaacattaacatgtattgtagacatgggcgatgcaaatgatgataccaccgaagaggatggcgtacataatagtaatcaagctgctaaaagaagacttcgtccgcaaactaattcacgtgctccaagtgatggttctcaatcagttaagcgcagtagctgtggcaaaaacaaatatattagtaatagcaataatggatcccatgcttcggatgatgcacataacagtatccttgctgcaaagagaagacgttctactcaacctaatttgcaagatacagaacaagatactgagcaagatgtaattgaacgagtccaggtgcagagtttgaatggtaccttacaaaatggtactaaaatggttcagcacaagggccatggcaagaacaaatgtaaggaagttgccaaactcaaggagaaccaaaaaattaaagttgagttttacaacaatcgtgctctttcgaatagtttgtcacgtcatctgggtagaattgttcgtgatcggaacattactccggtcaaagtgaagaaatggtcagacattagtaacacagagcaggaacacatatttgcctcgattacagacaagtttgaaaatgaagatccagatattaaaattgatgtatacaaagatgagataatggaacatgccaagtctctttggattaactggcgtggagatttgcatcgacattttgtgaaaccggcaaaaactatgcagcaggctacaaaaaataagccaaaggattttgacccatctgattggcaatggcttgtccaggagcatttttatagcaaagattttattgcaatgagccttagaaactctcggaacagagcaggcttaaaaatgcctcatcgcactggaagcaaacccttcaaagagataatctacaatatgggaggaaaggaaaacagaccaccaactttggatgagttattctttgagactcgcaagaagggagacactttggtggatgttgaatcttctaggatgcatgcagaacttgtggatgtagttagctcagatcctaatctctccaatgttgaagttatggataaatgttacaacggtaataagcggcgtgatcatttaattggatttggtggtggtgtcaaagcaagagatgtacgaggcccagcacttagcaaagctgaattgcatgctagacttcgagcaacagagagggaaaacaaaatgcttcgagaagaaaatagtcaggttgttgagtctgtaaatcaaatgcagaatgaatgggctgagatgaggagagactattatgctaactgtgaaaatagaagtgacactggctcacaaagacgtcatgagaggatccacagtgaaagagatgactatgatgcaaatgaagatggacaactcaatgttatattcgttgtgctgttagacaaatgtgggaatcaatatattacaagcggacaccagaagatgatggtcgagggcatcgacatgaagaagatgataatggtgaccggcgtcaggacaacaatggtggacgatgacagatttctcgagaacctgaacgtcgccctcggaatcgcacgccggagtcgagtgtcagagatcgctatactacccaggagttggcaacaaggcgaatcactactactcgaagacgatgcgctgagacgcaaaaacgacaaaccaaaggcgggaggagagaagaagccagccaaggacgcacccgaatcaagcaagaagaaaagcggcaagagtgggaagaggaaagctcaagcagaagtccttgcatctgaatacgagcgcccgcccaaacacccagacccacaggacggtgatacaaagagaatatggtgccccatacacaagtcggacagacattctctggaggagtgcctcatcttcaaaaaatcgttggaaaggcagctggctttggagaagggtaagcgagtacgtgtagtcaagaaggcaactgagacaactactcaggactcggactccgcgtacccagattccgatcttcatgtctcgcacatcttcggaggttccacaacgtactcttcaaagcgagaatacaaaaaagtggagcgtgagccattgggcaagattatgctcccagtgactttcggccaagcaagcaacttccgaacggagcagataacatttgatgttgctgaattcgacacagcatacaacgccatcattggaagaacggcactcgcgaagttcatggccacatctcactacgcgtatcaggtacttaagatgcccgggccgaagggaacaatcactatccaagggaacgcaaagctggcggtccaatgcgacaagcggagcctcgacatggtcgagcacactcccagcccacccaccacagccgagccacccaagaaagtgatcaaaacgactaagacgccgaaaccagacggcgcaatcaaaatcgtcccactctctagtgccaaccccgacaagacgccgtccgacatgccgggggtccccagggaggtgattgagcacaaacttatggtgcgacccgatgccaagctagtaaagcaaaaactgcggagatttgcaccagatcggaaacatgccatacgagaagagctcgataaacttcttaaggctggtttcatcagagaggcgtgccccaaggatcacttccctcttcctcaaatagaccaactggtggactcaacagctggttgtgagctgttaagcttccctgatgcttactccggctaccaccaaatcagcatggcaaaagaggacgaggagaagacagcattcatcacaccgttcggtgtattctgctacgtcaaaataccgtttggactcataaccgtagggaacactttccagtgcacggtccaaggggcacttagcgatcagttgggtaacaatgttgaggcctacgtcgatgacattgttgtcaaaaccaagacaggcgactcattgattgacgatctacgggaaaccttcgacaacctcagacgatatcgcctcatgctcaatgctgaaaagtgcacgttcggggtactgtcgggcaaactgctcggattcctcgtctctggcagaggaatagaagcaaatcccgagaagatcaaggcaatcaagaacatgaagtcgcccacaaggctcaaggacgtacagaagctaaccggatgcatggcggcgctaagtaggttcgtcgctaggatgggagaacgaggacaacctttcttcgcactgctaaaaaagcaagacaaatttgtatggacacaagaagccgaagaggcgttcatcgcactcaagcgctacttgtcaaatccccctgtacttgtttctccccaacctaatgaagaattgttcctctatattgctgctacgccctactctgtgagtactgtcattgttgtcgaaagagaaaaggtgcagagaccagtctattacgtcagcgaagctctacacgacgcaaagacaaggtacccacagatccaaaaactgctctacgcagtaatcatgacgtcaagaaagctacgccactacttccaagcccacaaggtcacagttgtctccgccttccttcttggcaaggtcgtgagaaacaaagacgttgtcggccgtattgcgaaatgggtagtcgagctaagccagtttgacgtccactttgtaccacgaacaaccatcaagtcagatagtcatatcgacaacgaaacatggacaatggcgttcgatggcgcgctcaacagccaaggagcaggtgcggggttcatcttgacatcaccttcaggagatcagttcaagcatgcaattcacctcaacttcagggcaaccaacaacacagccgagtacgaaggactactcgctgggatgagagctgcagccatacttggggtcaagcgactgatcgtgaaaggggactccgaactagtcgcaaaccaggtgcacaaagattacaaatgctctagccctgagctgtccaagtatctcgcagaagtcaggaagctggaaaaaagatttgatgggatcgaggtccgacacgtatatcgcaaggacaacatcgagccggacgatctagcatggtgtgcgtctagacgagaaccactcgaacccggcacctttctggacatcctgacaaaaccatcagtgaaagaggcaaacaatgaagatagcccagtaacccccgacatcagcccgggggctacaaaggcagaatgcgccgttgtcgacatcgagaccacggacgactggcggaccccactcattaaattcataaacagagacgagttgccccaagacgacgcagaagccgagaaaataacccgtcaagcaaaaatctactgtatgatcagcaatgatttatataagaaggcaccgaacggggtacttctaaaatgcgtctcgtccgacgacagcaagcacctcctcctcgacatacacgaaggggtctgcgggtcacatgccgccggtcgtacattggtcggaaaagcctttcgacaaggatttttctggccaaccgcccttaaagacgcttgcgacatggtcgaaagggcaaacggcatagtactacaagggatcaagacccgtatctacggcaggctcatgtcacatgacaagaagtgggtcgaagaactcccctcggtactatgggccatgcgcaccacaccgacaacgtccaacaaggagacacccttcttcctcgtgtacggctcagaggccatgctccctaccgagttacgacatcagagtacacgagtacagaagcactccgatgaggatcaggaggaacagcgaaacgatgacgtgaacctactcgaggaatatcgagaacaggtcgccgcaagagcagctagctaccaacaggccctccgccgatatcacgagaagcgcatccgagcacgcatactttcgatcggcgactacgtcctccgacgagttcaaagccaggcagggcgaaacaaactctcgcccaaatgggaaggaccgtacacgatcacacaagtcttgcggccaggcgcattcaagattgcagacggcgatggtcgtgagttagcaaattcttggaacattgaccagttgcataaattctatgtataa

SEQ ID NO: 401 - protein, 2710 aa, Oryza sativa
MAPSKAWMGLVDDRLNHEYLEGVEKFIDYAFSKLDGVQVIRCPCIKCCNTYSLPRHIVSSHLKAYGILRSYTFWYHHGEVLAEQENDIEVDEYDSQEFNGEGYNGMQDLMENLFPQCNTPGGDEATHESTDQGPEEEPNTDAAKFYALLDKYNQPLYEGSRTSKLSALVNLLHVKNLGKWSNKSFTALLELLRKDFLPHDSTLPNSYYEAKKTIRELGLSYIKIDACKNDCMLYWKEDIDAESCKVCGSSRWKEEKHTGEIKHSSAGKKIPHKTMRYFPIKPRLQRLFMCRKTAAYAKWHKECRVDDGVMRHPADSKAWKEFDKIHSSFASEPRNVRLCLASDRFQPFANMRTSYSIWPVFLVPLNLPPWMCMKQQNVMLSMLLPGPDGPGDAIDVYLQPLIEELIELWEDGVDTYDSSTKTNFKLRAQLFFGQCMTSLLMEIYQAIAQRESWHVQFVIKKQIQCGLRKVGSFATWVIGAFFAEATDGEMTELLLMVQKRAENHQRSYPEMMCSSNRCVNMKERKMSGLKSHDCHVILNRILPLALRGLLPENIYEPLVELSQFFKKLNSKALSVEQLEEMDAQIPIILCKLEKEFPPSFFDVMMHLPVHLAREALIGGPTIYRWMYLFERQIHCLKSLVQNMARPEGSIAEGYIADEFMTLSSRYLDDVETKHNRPGRIHDTSIGNKFNLSIFSCAGRPIGSRKTRDLDMLESEQAHIYILRNCDEVQEYISEYCNSTEGSSMVQFTSTWNKKFINWFKEKIYQQHQHDKSEVMEDLLSLSRGPLKNITCFTGYDMNGFRYRTERRDSRRCTQNSGVMVLGDDVEYYGVLTEILEIQYLGGRRVPLFRCNWVDVFNKDRGIRIDKYGLTSVNLQRLLQTDEPFVLASQAAQVFFVKDNQIKGWHLIEKMQPRDTYQVVVMISGRYGRNRVSALQNNNSKFISPGLLQQQVARRTAPSTADDLFGSPENMVSATAIVQEGKSKPVYVRQSNLKYQKHTAVPQPGEEDDSDEESIDTWLRRAREYNNSKTLTCIVDMGDANDDTTEEDGVHNSNQAAKRRLRPQTNSRAPSDGSQSVKRSSCGKNKYISNSNNGSHASDDAHNSILAAKRRRSTQPNLQDTEQDTEQDVIERVQVQSLNGTLQNGTKMVQHKGHGKNKCKEVAKLKENQKIKVEFYNNRALSNSLSRHLGRIVRDRNITPVKVKKWSDISNTEQEHIFASITDKFENEDPDIKIDVYKDEIMEHAKSLWINWRGDLHRHFVKPAKTMQQATKNKPKDFDPSDWQWLVQEHFYSKDFIAMSLRNSRNRAGLKMPHRTGSKPFKEIIYNMGGKENRPPTLDELFFETRKKGDTLVDVESSRMHAELVDVVSSDPNLSNVEVMDKCYNGNKRRDHLIGFGGGVKARDVRGPALSKAELHARLRATERENKMLREENSQVVESVNQMQNEWAEMRRDYYANCENRSDTGSQRRHERIHSERDDYDANEDGQLNVIFVVLLDKCGNQYITSGHQKMMVEGIDMKKMIMVTGVRTTMVDDDRFLENLNVALGIARRSRVSEIAILPRSWQQGESLLLEDDALRRKNDKPKAGGEKKPAKDAPESSKKKSGKSGKRKAQAEVLASEYERPPKHPDPQDGDTKRIWCPIHKSDRHSLEECLIFKKSLERQLALEKGKRVRVVKKATETTTQDSDSAYPDSDLHVSHIFGGSTTYSSKREYKKVEREPLGKIMLPVTFGQASNFRTEQITFDVAEFDTAYNAIIGRTALAKFMATSHYAYQVLKMPGPKGTITIQGNAKLAVQCDKRSLDMVEHTPSPPTTAEPPKKVIKTTKTPKPDGAIKIVPLSSANPDKTPSDMPGVPREVIEHKLMVRPDAKLVKQKLRRFAPDRKHAIREELDKLLKAGFIREACPKDHFPLPQIDQLVDSTAGCELLSFPDAYSGYHQISMAKEDEEKTAFITPFGVFCYVKIPFGLITVGNTFQCTVQGALSDQLGNNVEAYVDDIVVKTKTGDSLIDDLRETFDNLRRYRLMLNAEKCTFGVLSGKLLGFLVSGRGIEANPEKIKAIKNMKSPTRLKDVQKLTGCMAALSRFVARMGERGQPFFALLKKQDKFVWTQEAEEAFIALKRYLSNPPVLVSPQPNEELFLYIAATPYSVSTVIVVEREKVQRPVYYVSEALHDAKTRYPQIQKLLYAVIMTSRKLRHYFQAHKVTVVSAFLLGKVVRNKDVVGRIAKWVVELSQFDVHFVPRTTIKSDSHIDNETWTMAFDGALNSQGAGAGFILTSPSGDQFKHAIHLNFRATNNTAEYEGLLAGMRAAAILGVKRLIVKGDSELVANQVHKDYKCSSPELSKYLAEVRKLEKRFDGIEVRHVYRKDNIEPDDLAWCASRREPLEPGTFLDILTKPSVKEANNEDSPVTPDISPGATKAECAVVDIETTDDWRTPLIKFINRDELPQDDAEAEKITRQAKIYCMISNDLYKKAPNGVLLKCVSSDDSKHLLLDIHEGVCGSHAAGRTLVGKAFRQGFFWPTALKDACDMVERANGIVLQGIKTRIYGRLMSHDKKWVEELPSVLWAMRTTPTTSNKETPFFLVYGSEAMLPTELRHQSTRVQKHSDEDQEEQRNDDVNLLEEYREQVAARAASYQQALRRYHEKRIRARILSIGDYVLRRVQSQAGRNKLSPKWEGPYTITQVLRPGAFKIADGDGRELANSWNIDQLHKFYV

SEQ ID NO: 402 - DNA, 856 bp, Oryza sativa
aacatcctcttcaagcacatcaaggagttgctgtccggcgacaccgccgtcatcgccgagaccggtgactcgtggttcaactgccagaagctcaggctccccgagggctgcgggtacgagttccagatgcagtacggctcgatcgggtggtccgtcggcgccacgctcggctacgcccaggcggccaaggacaagcgcgtcatctcctgcatcggtgacggtagcttccagatgacggcgcaggacgtgtcgacgatgttgcggtgcgggcagaagagcatcatcttcctcatcaataatggtgggtacaccatcgaggtggagatccacgacgggccgtacaacgtcatcaagaactgggactacaccggcctcatcgacgccatccacaactctgacggcaactgctggacaaagaaggtccggactgaggaggagctgatagaggcgatcgcgacggcaacgggcgccaagaaagattgcctctgcttcatcgagatcatcgtgcacaaggatgacacgagcaaagagcttctcgagtggggatccagggtatcggctgccaacagcaggccgccgaatccccagtgattttgctagctggtcttctcatgacgcacactcgaatgcgctagtctgccaatgtccgagatatgctgcccattatcgtctgtgaattaattgtctaatgcgtctgcatccagttaaattttctcagccgagaggttgaagtatttatgtagatggggttgcccgtcttatgattatgtttgtaattcaatatgcttggcattaatgttttgtaaacctgtaatgtattgcgatgaaataacatggacgatttgaaggagaagaa

SEQ ID NO: 403 - protein, 154 aa, Oryza sativa
MQYGSIGWSVGATLGYAQAAKDKRVISCIGDGSFQMTAQDVSTMLRCGQKSIIFLINNGGYTIEVEIHDGPYNVIKNWDYTGLIDAIHNSDGNCWTKKVRTEEELIEAIATATGAKKDCLCFIEIIVHKDDTSKELLEWGSRVSAANSRPPNPQ

1-42. (canceled)

43. A method for enhancing a yield-related trait in a plant relative to a corresponding control plant, comprising modulating expression in a plant of a nucleic acid selected from the group consisting of
(a) a nucleic acid encoding an IAA2-like polypeptide, wherein said IAA2-like polypeptide comprises an AUX/IAA domain (PFAM accession number PF2309, InterPro entry IPR003311) and the protein motif of SEQ ID NO: 22; and
(b) a nucleic acid encoding a NAC10-like polypeptide, wherein said NAC10-like polypeptide comprises a NAM domain (Pfam PF02365).

44. The method of claim 43, wherein
(a) the IAA2-like polypeptide comprises one or more of the following motifs:
(SEQ ID NO: 23)

| | | |
|---|---|---|
| (i) | Motif 2: | (Q/G)LLDG(S/T)G(E/V)YTL; |

(SEQ ID NO: 24)

| | | |
|---|---|---|
| (ii) | Motif 3: | LLDGSGEYTLVY; |
| and | | |

(SEQ ID NO: 25)

| | | |
|---|---|---|
| (iii) | Motif 4, | KKLELRLGPPG; |

or
(b) the NAC10-like polypeptide comprises one or more of the following motifs:
(SEQ ID NO: 379)

| | | |
|---|---|---|
| (i) | Motif I: | (A/P/S/N/V/T) (T/V/L/I/A/S) |
| | | (T/P/S/D/V/Q) (D/V/I/F) I (A/T/G/P); |

(SEQ ID NO: 380)

| | | |
|---|---|---|
| (ii) | Motif II: | (R/N/K) (E/G/S) (I/R/S/Q/A/V/L) |
| | | (R/Q) (A/P) (N/S/R); |
| and | | |

(SEQ ID NO: 381)

| | | |
|---|---|---|
| (iii) | Motif III: | (C/Y) (R/K) (L/I/V) (S/Y/H/F/R) |
| | | (N/K/Q) K (D/K/N/C/S/T/G/M/A/R), |

wherein amino acids indicated between parentheses at a position represent alternative amino acids at that position.

45. The method of claim 43, wherein the modulated expression is effected by introducing and expressing in the plant a nucleic acid encoding an IAA2-like polypeptide or a nucleic acid encoding a NAC10-like polypeptide.

46. The method of claim 43, wherein
(a) the nucleic acid encoding an IAA2-like polypeptide comprises:
(i) a nucleotide sequence that encodes any one of the proteins listed in Table A1,
(ii) a portion of the nucleotide sequence of (i), or
(iii) a nucleotide sequence capable of hybridizing with the nucleotide sequence of (i) or (ii);
or
(b) the nucleic acid encoding a NAC10-like polypeptide comprises:
(i) a nucleotide sequence that encodes any one of the proteins listed in Table A2,
(ii) a portion of the nucleotide sequence of (i), or
(iii) a nucleotide sequence capable of hybridizing with the nucleotide sequence of (i) or (ii).

47. The method of claim 43, wherein
(i) the nucleic acid encoding an IAA2-like polypeptide encodes an orthologue or paralogue of any of the proteins given in Table A1; or
(ii) the nucleic acid encoding a NAC10-like polypeptide encodes an orthologue or paralogue of any of the proteins given in Table A2.

48. The method of claim 43, wherein the enhanced yield-related trait comprises increased yield, increased biomass, and/or increased seed yield relative to a corresponding control plant.

49. The method of claim 43, wherein the enhanced yield-related trait is obtained under non-stress conditions.

50. The method of claim 43, wherein the enhanced yield-related trait is obtained under conditions of drought stress, salt stress, or nitrogen deficiency.

51. The method according to claim 45, wherein
(i) the nucleic acid encoding an IAA2-like polypeptide is operably linked to a constitutive promoter, a GOS2 promoter, or a GOS2 promoter from rice; or
(ii) the nucleic acid encoding a NAC10-like polypeptide is operably linked to a root specific promoter, a constitutive promoter, an RCc3 promoter, a GOS2 promoter, an RCc3 promoter from rice, or a GOS2 promoter from rice.

52. The method of claim 43, wherein the nucleic acid encoding an IAA2-like polypeptide and/or the nucleic acid encoding a NAC10-like polypeptide is of plant origin, from a monocotyledonous plant, from the family Poaceae, from the genus Oryza, or from Oryza sativa.

53. A plant or part thereof, including seeds, obtained by the method of 43, wherein the plant or part thereof comprises a recombinant nucleic acid encoding an IAA2-like polypeptide or a recombinant nucleic acid encoding a NAC10-like polypeptide.

54. A construct comprising:
(i) a nucleic acid;
(ii) one or more control sequences capable of driving expression of said nucleic acid; and optionally
(iii) a transcription termination sequence,
wherein said nucleic acid is selected from the group consisting of:
(a) a nucleic acid encoding an IAA2-like polypeptide, wherein said IAA2-like polypeptide comprises an AUX/IAA domain (PFAM accession number PF2309, InterPro entry IPR003311) and the protein motif of SEQ ID NO: 22;
(b) a nucleic acid encoding an IAA2-like polypeptide, wherein the IAA2-like polypeptide comprises one or more of the following motifs:
(SEQ ID NO: 23)

| | | |
|---|---|---|
| (i) | Motif 2: | (Q/G)LLDG(S/T)G(E/V)YTL; |

(SEQ ID NO: 24)

| | | |
|---|---|---|
| (ii) | Motif 3: | LLDGSGEYTLVY; |
| and | | |

(SEQ ID NO: 25)

| | | |
|---|---|---|
| (iii) | Motif 4, | KKLELRLGPPG; |

(c) a nucleic acid encoding a NAC10-like polypeptide, wherein said NAC10-like polypeptide comprises a NAM domain (Pfam PF02365); and
(d) a nucleic acid encoding a NAC10-like polypeptide, wherein the NAC10-like polypeptide comprises one or more of the following motifs:
(SEQ ID NO: 379)

| | | |
|---|---|---|
| (i) | Motif I: | (A/P/S/N/V/T) (T/V/L/I/A/S) |
| | | (T/P/S/D/V/Q) (D/V/I/F) I |
| | | (A/T/G/P); |

(SEQ ID NO: 380)

| | | |
|---|---|---|
| (ii) | Motif II: | (R/N/K) (E/G/S) (I/R/S/Q/A/V/L) |
| | | (R/Q) (A/P) (N/S/R); |
| and | | |

(SEQ ID NO: 381)

| | | |
|---|---|---|
| (iii) | Motif III: | (C/Y) (R/K) (L/I/V) (S/Y/H/F/R) |
| | | (N/K/Q) K (D/K/N/C/S/T/G/M/A/R). |

55. The construct of claim 54, wherein one of the control sequences is a root specific promoter, a constitutive promoter, an RCc3 promoter, a GOS2 promoter, an RCc3 promoter from rice, or a GOS2 promoter from rice.

56. A plant, plant part, or plant cell transformed with the construct of claim 54.

57. A method for the production of a transgenic plant having increased yield, increased biomass, and/or increased seed yield relative to a corresponding control plant, comprising:
(i) introducing and expressing a nucleic acid in a plant or plant cell; and
(ii) cultivating the plant or plant cell under conditions promoting plant growth and development,
wherein said nucleic acid is selected from the group consisting of:
(a) a nucleic acid encoding an IAA2-like polypeptide, wherein said IAA2-like polypeptide comprises an AUX/IAA domain (PFAM accession number PF2309, InterPro entry IPR003311) and the protein motif of SEQ ID NO: 22;
(b) a nucleic acid encoding an IAA2-like polypeptide, wherein the IAA2-like polypeptide comprises one or more of the following motifs:
(SEQ ID NO: 23)

| | | |
|---|---|---|
| (i) | Motif 2: | (Q/G)LLDG(S/T)G(E/V)YTL; |

(SEQ ID NO: 24)

| | | |
|---|---|---|
| (ii) | Motif 3: | LLDGSGEYTLVY; |
| and | | |

(SEQ ID NO: 25)

| | | |
|---|---|---|
| (iii) | Motif 4, | KKLELRLGPPG; |

(c) a nucleic acid encoding a NAC10-like polypeptide, wherein said NAC10-like polypeptide comprises a NAM domain (Pfam PF02365); and
(d) a nucleic acid encoding a NAC10-like polypeptide, wherein the NAC10-like polypeptide comprises one or more of the following motifs:
(SEQ ID NO: 379)

| | | |
|---|---|---|
| (i) | Motif I: | (A/P/S/N/V/T) (T/V/L/I/A/S) |
| | | (T/P/S/D/V/Q) (D/V/I/F) I |
| | | (A/T/G/P); |

(SEQ ID NO: 380)

| | | |
|---|---|---|
| (ii) | Motif II: | (R/N/K) (E/G/S) (I/R/S/Q/A/V/L) |
| | | (R/Q) (A/P) (N/S/R); |
| and | | |

(SEQ ID NO: 381)

| | | |
|---|---|---|
| (iii) | Motif III: | (C/Y) (R/K) (L/I/V) (S/Y/H/F/R) |
| | | (N/K/Q) K (D/K/N/C/S/T/G/M/A/R). |

58. A transgenic plant having increased yield, increased biomass, and/or increased seed yield relative to a corresponding control plant, resulting from modulated expression of the nucleic acid encoding an IAA2-like polypeptide as defined in claim 43, or the nucleic acid encoding a NAC10-like polypeptide, or a transgenic plant cell derived from said transgenic plant.

59. The transgenic plant of claim 56, or a transgenic plant cell derived therefrom, wherein the plant is a crop plant, a monocot, a cereal, rice, maize, wheat, barley, millet, rye, triticale, sorghum, emmer, spelt, secale, einkorn, teff, milo, or oats.

60. Harvestable parts of the plant of claim 59, wherein said harvestable parts are shoot biomass and/or seeds.

61. Products derived from the plant of claim 59 and/or from harvestable parts thereof, wherein said harvestable parts are shoot biomass and/or seeds.

62. A method for enhancing a yield-related trait in a plant relative to a corresponding control plant, comprising introducing into a plant or plant cell the construct of claim 54.
